(19) United States
(12) Patent Application Publication
(10) Pub. No.: US 2020/0299400 A1
(43) Pub. Date: Sep. 24, 2020

(54) ANTIBODIES COMPRISING MODIFIED HEAVY CONSTANT REGIONS

(71) Applicant: BRISTOL-MYERS SQUIBB COMPANY, Princeton, NJ (US)

(72) Inventors: Nils LONBERG, Woodside, CA (US); Alan J. KORMAN, Piedmont, CA (US); Mark J. SELBY, San Francisco, CA (US); Bryan C. BARNHART, San Francisco, CA (US); Aaron P. YAMNIUK, Lawrenceville, NJ (US); Mohan SRINIVASAN, Cupertino, CA (US); Karla A. HENNING, Milpitas, CA (US); Michelle Minhua HAN, Piedmont, CA (US); Ming LEI, Princeton, NJ (US); Liang SCHWEIZER, Shanghai PR (CI); Sandra V. HATCHER, Hillsborough, NJ (US); Arvind RAJPAL, San Francisco, CA (US)

(73) Assignee: BRISTOL-MYERS SQUIBB COMPANY, Princeton, NJ (US)

(21) Appl. No.: 16/612,867

(22) PCT Filed: May 24, 2018
(86) PCT No.: PCT/US2018/034446

§ 371 Date: Nov. 12, 2019

Related U.S. Application Data
(60) Provisional application No. 62/599,221, filed on Dec. 15, 2017.
(60) Provisional application No. 62/511,178, filed on May 25, 2017.

(51) Int. Cl. C07K 16/28

(52) U.S. Cl. CPC C07K 16/2896; C07K 16/2827; C07K 16/2875; C07K 16/2878; C07K 2317/522; C07K 2317/524; A61K 2039/505; C07K 2317/53; C07K 2317/71; C07K 2317/72; C07K 2317/75; C07K 2317/77; C07K 2317/732; C07K 2317/526

(57) ABSTRACT

Provided herein are heavy chain constant regions (referred to as “modified heavy chain constant regions”), or functionally equivalent fragments thereof, that enhance biological properties of antibodies relative to the same antibodies in unmodified form. An exemplary modified heavy chain constant region includes an IgG2 hinge and three constant domains (i.e., CH1, CH2, and CH3 domains), wherein one or more of the constant region domains are of a non-IgG2 isotype (e.g., IgG1, IgG3 or IgG4). The heavy chain constant region may comprise wildtype human IgG domain sequences, or variants of these sequences. Also provided herein are methods for enhancing certain biological properties of antibodies that comprise a non-IgG2 hinge, such as internalization, agonism and antagonism, wherein the method comprises replacing the non-IgG2 hinge of the antibody with an IgG2 hinge.

### CROSS-REFERENCE TO RELATED APPLICATIONS

[0001] This application is a 35 U.S.C. 371 national stage filing of International Application No. PCT/US2018/034446, filed on May 24, 2018, which claims priority to U.S. Provisional Patent Application Ser. No. 62/511,178 filed May 25, 2017; U.S. Provisional Patent Application Ser. No. 62/599,221 filed Dec. 15, 2017. The contents of the aforementioned applications are hereby incorporated by reference in their entireties.

### SEQUENCE LISTING

[0002] The instant application contains a Sequence Listing which has been submitted electronically in ASCII format and is hereby incorporated by reference in its entirety. Said ASCII copy, created on Nov. 12, 2019, is named MXI_551US_SL.txt and is 644834 bytes in size.

### BACKGROUND

[0003] Antibody therapeutics is one of the fastest growing areas in the treatment of disease, such as cancer and immune disorders. Nevertheless, efficiently targeting an antigen by a therapeutic antibody remains a major challenge in health care. Therefore, antibody engineering has become a major focus in the pharmaceutical world. From this focus, a myriad of new engineered antibodies have emerged, such as antibody fragments, antibody drug conjugates (ADCs), antibodies with modified effector regions, and bispecific antibodies.

[0004] Antibodies facilitate their therapeutic properties through many different mechanisms. Antibodies may directly inhibit or activate a target antigen, thus regulating cell signaling. Antibodies may inhibit the binding of a ligand to a receptor. Antibodies may also induce or inhibit an immune response, for example, by boosting the subject's immune system to fight infection or cancer (e.g., as costimulators in the activation of T cells).

[0005] Furthermore, antibody-mediated internalization of a cell surface receptor/antigen is recognized as a major mechanism of action for therapeutic antibodies. In this instance, an antibody removes the target from the cell surface and from performing its function by inducing internalization into the cell. Indeed, one of the forerunners of antibody therapeutics is trastuzumab for the treatment of breast cancer. Trastuzumab targets the ErbB2 receptor and induces receptor/antibody internalization, thus inhibiting EGFR signaling. However, antibodies do not always display efficient internalization qualities, thus there is an ongoing need for antibodies with improved internalization functions. Accordingly, methods for improving the internalization of known therapeutic antibodies are highly desirable.

### SUMMARY

[0006] The invention provides heavy chain constant regions (referred to as “modified heavy chain constant regions”), or functionally equivalent fragments thereof, that enhance or modify biological properties of antibodies relative to the same antibodies in unmodified form. For example, antibodies comprising modified constant regions exhibit increased internalization and/or agonistic or antagonistic activity. Accordingly, antibodies of the invention are optimized versions of the original unmodified antibody. In certain embodiments, a heavy chain comprises a modified constant region comprising one or more mutations or modifications relative to the wildtype heavy chain constant region. In certain embodiments, a modified heavy chain constant region includes an IgG2 hinge and three constant domains (i.e., CH1, CH2, and CH3 domains), wherein one or more of the constant region domains is a non-IgG2 human isotype (e.g., IgG1, IgG3 or IgG4), or functionally equivalent fragments thereof. The modified constant region can include the corresponding wildtype amino acid sequence, or a variant thereof, e.g., one or more (e.g., between 1-10, or more) amino acid substitutions or deletions within the hinge or the CH1, CH2, CH3 domains relative to the wildtype amino acid sequence. Accordingly, the amino acid sequence of the hinge and/or each constant domain is at least about 80%, 85%, 90%, 95%, or more (i.e., 96%, 97%, 98%, 99%, or 100%) identical to the corresponding wildtype amino acid sequence.

[0007] In one embodiment, the modified heavy chain constant region includes a wildtype human IgG2 hinge, or an amino acid sequence that is at least 95% identical to the amino acid sequence of a wildtype human IgG2 hinge. The hinge can further contain additional modifications, for example, to reduce disulfide bond formation. In one embodiment, the hinge includes the amino acid substitution C219S, relative to the wildtype human IgG2 hinge. In certain embodiments, the hinge comprises the amino acid sequence set forth in any of SEQ ID NO: 8, 21-23, 126-132 and 134-147 or one of these sequences that comprises 1-3 amino acids inserted between CVE and CPP.

[0008] In certain embodiments, the modified heavy chain constant region includes an IgG2 CH1 domain, e.g., a wildtype human IgG2 CH1 domain, or an amino acid sequence that is at least 95% identical to the amino acid sequence of a wildtype human IgG2 CH1 domain (SEQ ID NO: 7).

[0009] In certain embodiments, the modified heavy chain constant region includes an IgG1 CH2 domain, e.g., a wildtype human IgG1 CH2 domain, or an amino acid sequence that is at least 95% identical to the amino acid sequence of a wildtype human IgG1 CH2 domain. The CH2 domain may contain additional modifications (e.g., to reduce or eliminate effector functions). In certain embodiments, the CH2 domain comprises the amino acid substitutions A330S and P331S, relative to wildtype full-length human IgG1 CH2. In certain embodiments, the CH2 domain comprises SEQ ID NO: 24.

[0010] In certain embodiments, the modified heavy chain constant region includes an IgG1 CH3 domain, e.g., a wildtype human IgG1 CH3 domain, or an amino acid sequence that is at least 95% identical to the amino acid sequence of a wildtype human IgG1 CH3 domain. The CH3 domain can further contain additional modifications to confer a particular allotype. In one embodiment, the CH3 domain contains the amino acid residue E at position 356 and the amino acid M at position 358 (“f” allotype), relative to wildtype full-length human IgG1 of a different allotype (e.g., “fa” allotype, having D and L, respectively at those positions). In certain embodiments, the CH3 domain comprises SEQ ID NO: 5.

[0011] In a particular embodiment, the antibody comprises a modified heavy chain constant region wherein (a) the CH1 domain is a wildtype human IgG2 CH1 domain or a wildtype IgG1 CH1 domain, with or without additional modification, (b) the hinge is a wildtype IgG2 hinge with or without a C219S substitution, (c) the CH2 domain is a wildtype human IgG1 CH2 domain or a wildtype IgG2 CH2 domain, with or without additional modifications, and (d) the CH3 domain is a wildtype human IgG1 CH3 domain or a wildtype human IgG2 CH3 domain, with or without amino acid E at position 356 and amino acid M at position 358 (e.g., of allotype f or fa). In a specific embodiment, the modified heavy chain constant region comprises an amino acid sequence described herein, e.g., set forth in any one of SEQ ID NOs: 26-37 and 78-93.

[0012] Antibodies of the invention (i.e., antibodies having a modified constant region) may be fully human antibodies or humanized antibodies, and further exhibit one or more enhanced or altered features, compared to the same antibodies without a modified heavy chain constant region. These features may include increased or altered internalization by a cell, agonistic activity, formation of large cross-linked complexes, ADCC, receptor mediated signaling, antagonist activity, immuno-modulating activity and anti-tumor activity; or introduction of a new property, e.g., agonist activity.

[0013] Bispecific molecules and immunoconjugates containing modified constant regions of the invention are also provided, as well as compositions which contain the antibodies, bispecifics, or immunoconjugates and an acceptable pharmaceutical carrier. Such compositions also may include one or more additional therapeutic agents, e.g., an agent that stimulates the immune system, such as a checkpoint inhibitor, a co-stimulatory molecule, an anti-CD39 antibody, or an anti-A2AR antibody.

[0014] Methods for preparing an antibody comprising a modified heavy chain constant region are also provided. Certain methods provided herein include methods of increasing internalization of an antibody by a cell, and methods for increasing the agonist activity of an antibody, compared to the same antibody comprising a hinge of a non-IgG2 isotype. Such methods comprise the steps of providing an antibody having a hinge that is not an IgG2 hinge, and replacing the hinge with an IgG2 hinge (such as a hinge that is a wildtype human IgG2 hinge, a hinge having an amino acid sequence that is at least 95% identical to the amino acid sequence of a wildtype human IgG2 hinge, or a hinge that is modified to reduce disulfide bond formation, e.g., a hinge that comprises amino acid substitution C219S). In one embodiment, internalization of the antibody is enhanced or increased by at least 10%, 30%, 50%, 75%, 2 fold, 3 fold, 5 fold or more, resulting in a reduction of the T_{1/2} by at least 10%, 30%, 50%, 75%, 2 fold, 3 fold, 5 fold or more. In certain embodiments, agonist activity is increased or enhanced by at least 10%, 30%, 50%, 75%, 2 fold, 3 fold, 5 fold or more as defined by increased cytokine release or increased proliferation in effector T cells; reduced T regulatory cell activity if engagement on Tregs reduces Treg function; or increased depletion of Tregs.

[0015] In certain embodiments, the method further includes the step of replacing at least one of the CH1, CH2, or CH3 domains with a CH1, CH2, or CH3 domain of a different isotype. Such replacements include, for example: (a) replacing the CH1 domain with an IgG1 CH1 domain or an IgG2 CH1 domain; (b) replacing the CH2 domain with an IgG1 CH2 domain or an IgG2 CH2 domain; and/or (b) replacing the CH3 domain with an IgG1 CH3 domain or an IgG2 CH3 domain, wherein the replacement domain has the wildtype sequence or at least 95% identity the wildtype sequence. In certain embodiments, the CH1 domain comprises the amino acid sequence as set forth in SEQ ID NO: 7. In certain embodiments, the CH2 domain is modified to reduce or eliminate effector functions, e.g., the CH2 domain comprises amino acid substitutions A330S and P331S (SEQ ID NO:24). In certain embodiments, the CH3 domain comprises the amino acid residue E at position 356 and the amino acid M at position 358 (SEQ ID NO: 5, allotype “f”) and in certain embodiments, the CH3 domain comprises allotype “fa.”

[0016] Methods provided herein include methods of treating a subject by administering an antibody, bispecific molecule or immunoconjugate comprising a modified heavy chain constant region. One or more additional therapeutic agents, e.g., a therapeutic agent that stimulates the immune system, such as a checkpoint inhibitor, a co-stimulatory molecule also can be co-administered.

[0017] Provided herein are antibodies comprising a modified heavy chain constant region comprising a CH1 domain, a hinge, a CH2 domain, and a CH3 domain in order from N- to C-terminus, and wherein (a) the CH1 domain comprises the amino acid sequence of SEQ ID NO: 7 or an amino acid sequence that differs therefrom in at most 5 amino acids or which is at least 95% identical to SEQ ID NO: 7, and wherein at least one of C131, R133, E137, S138 or R217 are not substituted or deleted; (b) a hinge comprising any one of SEQ ID NO: 8, 21-23, 126-132 or 134-147 or a sequence that comprises 1-3 amino acids inserted between CVE and CPP, or which differs therefrom in at most 5 amino acids, wherein the hinge does not comprise a substitution or deletion at both C219 and C220; (c) the antibody has at least one enhanced property or a new introduced property relative to the same antibody that comprises an IgG1 hinge and CH1 domain; and (d) the modified heavy chain constant region is not a wildtype IgG2 constant region or an IgG2 constant region comprising C219S and/or C220S. The hinge may comprise the amino acid sequence ERKXCVECPPCPAP (SEQ ID NO: 129) or ERKCXVECPPCPAP (SEQ ID NO: 130), wherein X is any amino acid except cysteine. For example, the hinge may comprise the amino acid sequence ERKSCVECPPCPAP (SEQ ID NO: 131) or ERKCSVECPPCPAP (SEQ ID NO: 132). In certain embodiments at least one of, or all of, amino acid residues P233, V234, A235 and G237 are deleted or substituted with another amino acid residue, e.g., the corresponding amino acid in an IgG1 hinge. In certain embodiments, none of amino acid residues R133, E137, S138 and R217 or none of C131, R133, E137, S138 and R217 are substituted or deleted. In certain embodiments, N192 and/or F193 are substituted with another amino acid. The antibody may comprise a CH2 domain that is at least 95% identical to that of wildtype IgG1. The antibody may comprise a CH3 domain that is at least 95% identical to that of wildtype IgG1. In certain embodiments, the CH2 and/or CH3 domain is not a wildtype IgG1 CH2 and/or CH3 domain, and the antibody has an effector function that is more potent than that of wildtype IgG1. In certain embodiments, the CH2 and/or CH3 domain is not a wildtype IgG1 CH2 and/or CH3 domain, and the antibody has an effector function that less potent than that of wildtype IgG1. In certain embodiments, the antibody comprises a CH2 domain and/or CH1 domain that is at least 95% identical to that of wildtype IgG1 or IgG4. In certain embodiments, the antibody has at least one enhanced property selected from agonist activity, antibody mediated receptor internalization, ADCC, receptor mediated signaling, antagonist activity, immuno-modulating activity or anti-tumor activity; or a newly introduced property, which is agonist activity.

[0018] In certain embodiments, an antibody comprises a modified heavy chain constant region, wherein (a) the CH1 domain is a wildtype human IgG2 CH1 domain; (b) the hinge comprises SEQ ID NO: any one of SEQ ID NO: 8, 21-23, 126-132 or 134-147 or a sequence that comprises 1-3 amino acids inserted between CVE and CPP; (c) the CH2 domain is a wildtype human IgG1 CH2 domain or a modified CH2 domain conferring enhanced or reduced effector function to the antibody; and (d) the CH3 domain is a wildtype human IgG1 CH3 domain or a modified CH3 domain conferring enhanced or reduced effector function to the antibody. A modified heavy chain constant domain may comprise the amino acid sequence set forth in any one of SEQ ID NOs: 26-37, 54-56, 78-125, 152-232, 234-245 and 247-262, or an amino acid sequence that is at least 95% identical to one or more of SEQ ID NOs: 26-37, 54-56, 78-125, 152-232, 234-245 and 247-262. For heavy chains that comprise an Fc having an amino acid sequence that is at least 95% identical to any of these sequences, it is preferable that the specific amino acid mutations made to modulate biological activity in these sequences are not varied.

[0019] In certain embodiments, an antibody comprises a modified heavy chain constant region, wherein the heavy chain constant region comprises a CH1 domain and a hinge comprising the sequence

(SEQ ID NO: 133)
ASTKGPSVFPLAPCSRSTSESTAALGCLVKDYFPEPVTVSWNSGALTSGV
HTFPAVLQSSGLYSLSSVVTVPSSNFGTQTYTCNVDHKPSNTKVDKTVER
KCCVECPPCPAPPVAG,

or an amino acid sequence that differs from SEQ ID NO: 133 in at most 10 amino acids or is at least 90% identical to SEQ ID NO: 133, wherein (i) at least one of C131, R133, E137, S138 and R217 is not substituted with another amino acid or deleted; (ii) C219 and C220 may be substituted with another amino acid or deleted, but C219 and C220 may not both be substituted or deleted; (iii) 1-3 amino acids may be inserted between CVE and CPP in the hinge; (iv) the hinge optionally comprises an additional amino acid at the C-terminus, e.g., G; (v) one or more of amino acids P233, V234, A235 and G237 may be substituted with another amino acid (e.g., the corresponding amino acid from IgG1) or deleted; (vi) the CH2 and CH3 domains may be wildtype or modified IgG1, IgG2, IgG3 or IgG4 CH2 and CH3 domains; (vii) the modified heavy chain constant region is not a wildtype IgG2 heavy chain constant region or a wildtype IgG2 heavy constant domain with C219S or C220S; and (viii) the antibody has at least one enhanced property or a new introduced property relative to the same antibody that comprises an IgG1 hinge and CH1 domain. In certain embodiments, the antibody has at least one enhanced property selected from agonist activity, antibody mediated receptor internalization, ADCC, receptor mediated signaling, antagonist activity, immuno-modulating activity or anti-tumor activity; or a newly introduced property, which is agonist activity. In certain embodiments, none of amino acids C131; R133; E137; S138; R217 are substituted with another amino acid or deleted. In certain embodiments, N192 and/or F193 are not substituted or are N192S and/or F193L, respectively. In certain embodiments, C219 is C219S, C220 is C220S, P233-G237 are substituted or deleted; V234-G237 are substituted or deleted; A235-G237 are substituted or deleted; G237 is substituted or deleted; P233 is substituted or deleted; P233-V234 are substituted or deleted; or P233-A235 are substituted or deleted. The antibody may have effector function, or be deprived of effector function. The antibody may comprise a wildtype or modified IgG1 CH2 domain and or a wildtype or modified IgG1 CH3 domain.

[0020] In certain embodiments, an antibody comprises a modified heavy chain constant region, wherein the heavy chain constant region comprises a CH1 domain comprising the sequence ASTKGPSVFPLAPCSRSTSESTAALGCLVKDYFPEPVTVSWNSGALTSGVHTFPAVL QSSGLYSLSSVVTVPSSNFGTQTYTCNVDHKPSNTKVDKTVE (SEQ ID NO: 7), or an amino acid sequence that differs from SEQ ID NO: 7 in at most 10 amino acids or is at least 90% identical to SEQ ID NO: 7, wherein (i) at least one of C131, R133, E137, S138 and R217 is not substituted or deleted; (ii) the modified heavy chain constant region is not a wildtype IgG2 heavy chain constant region or a wildtype IgG2 heavy constant domain with C219S or C220S; and (iii) the antibody has at least one enhanced property or a new introduced property relative to the same antibody that comprises an IgG1 hinge and CH1 domain. The antibody may have at least one enhanced property selected from agonist activity, antibody mediated receptor internalization, ADCC, receptor mediated signaling, antagonist activity, immuno-modulating activity or anti-tumor activity; or a newly introduced property, which is agonist activity. In certain embodiments, none of amino acids C131; R133; E137 and S138 are substituted with another amino acid or deleted. In certain embodiments, N192 and/or F193 are not substituted or are N192S and/or F193L, respectively. The antibody may have effector function, or be deprived of effector function. The antibody may comprise a wildtype or modified IgG1 CH2 domain and or a wildtype or modified IgG1 CH3 domain.

[0021] An antibody may comprise a modified heavy chain constant region, wherein the heavy chain constant region comprises a hinge comprising the sequence

(SEQ ID NO: 8)
ERKCCVECPPCPAPPVAG,

or an amino acid sequence that differs from SEQ ID NO: 8 in at most 5 amino acids, wherein (i) C219 and C220 may be substituted with another amino acid or deleted, but C219 and C220 may not both be substituted or deleted; (ii) one or more of amino acids P233, V234, A235 and G237 may be substituted or deleted; (iii) 1-3 amino acids may be inserted between CVE and CPP in the hinge; (iv) the hinge optionally comprises an additional amino acid at the C-terminus, e.g., G; (v) the CH2 and CH3 domains may be wildtype or modified IgG1, IgG2, IgG3 or IgG4 CH2 and CH3 domains; (vi) the modified heavy chain constant region is not a wildtype IgG2 heavy chain constant region or a wildtype IgG2 heavy constant domain with C219S or C220S; and (vii) the antibody has at least one enhanced property or a new introduced property relative to the same antibody that comprises an IgG1 hinge and CH1 domain. The antibody may have at least one enhanced property selected from agonist activity, antibody mediated receptor internalization, ADCC, receptor mediated signaling, antagonist activity, immuno-modulating activity or anti-tumor activity; or a newly introduced property, which is agonist activity. In certain embodiments, C219 is C219S, C220 is C220S, P233-G237 are substituted or deleted; V234-G237 are substituted or deleted; A235-G237 are substituted or deleted; G237 is substituted or deleted; P233 is substituted or deleted; P233-V234 are substituted or deleted; or P233-A235 are substituted or deleted. The antibody may have effector function, or be deprived of effector function. The antibody may comprise a wildtype or modified IgG1 CH2 domain and or a wildtype or modified IgG1 CH3 domain.

[0022] Also provided are antibodies comprising a modified heavy chain constant region, wherein the heavy chain constant region comprises an IgG1 or IgG2 hinge, and wherein the hinge is lacking 1-7 amino acids, and wherein the antibody has at least one enhanced property or a new introduced property relative to the same antibody that comprises an IgG1 hinge and CH1 domain. The antibody may have at least one enhanced property selected from agonist activity, antibody mediated receptor internalization, ADCC, receptor mediated signaling, antagonist activity, immuno-modulating activity or anti-tumor activity; or a newly introduced property, which is agonist activity. The hinge may be an IgG2 hinge that is lacking 1-4 amino acids, e.g., amino acids C219, C220, V222 and E224. The hinge is an IgG1 hinge that is lacking amino acids S219, C220, D221, K222, T223, H224 and T225. The antibody may comprise an IgG2 CH1 domain that is wildtype or modified; an IgG1 CH1 domain that is wildtype or modified, and an IgG1, IgG2 or IgG4 CH2 domain and an IgG1, IgG2 or IgG4 CH3 domain.

[0023] Antibodies with modified heavy chain constant regions may be human or humanized antibodies, or antigen binding portions thereof. In certain embodiments, the antibody binds specifically to an antigen that is involved in immune regulation. The antibody may be an agonist of a costimulatory receptor or an antagonist of an inhibitory receptor. For example, the antibody may bind to a costimulatory receptor, e.g., selected from the group of B7-1, B7-2, CD28, 4-1BB, GITR, OX40, ICOS, CD70, CD27, CD40, DR3 or CD28H, or the antibody may bind to an inhibitory receptor, e.g., selected from the group of CTLA-4, PD-1, PD-L1, PD-L2, LAG-3, TIM-3, Galectin 9, CEACAM-1, BTLA, CD69, Galectin-1, TIGIT, CD113, GPR56, VISTA, 2B4, CD48, GARP, PD1H, LAIR1, TIM-1 and TIM-4. The antigen may be an antigen that is required to be internalized, e.g., CD73. The antigen may be CD39.

[0024] In certain embodiments, an antibody comprising a modified heavy chain constant region binds specifically to a costimulatory receptor, e.g., GITR, OX40, 4-1BB, CD28, ICOS, CD40, CD27 or any other TNFR superfamily member, and comprises a modified heavy chain constant region selected from the group of SEQ ID NOs: 26-37, 54-56, 78-125, 152-232, 234-245 and 247-262. In certain embodiments, the antibody exhibits enhanced or altered agonist activity relative to an antibody having the same variable regions and light chain, but comprising an IgG1 heavy chain constant region.

[0025] In certain embodiments, an antibody comprising a modified heavy chain constant region binds specifically to a cell surface molecule, e.g., CD73, and triggers antibody mediated internalization of the cell surface molecule, and comprises a modified heavy chain constant region selected from the group of SEQ ID NOs: 26-37, 54-56, 78-125 and 152-232. In certain embodiments, the antibody possesses enhanced or altered internalization properties relative to an antibody having the same variable regions and light chain, but comprising an IgG1 heavy chain constant region. Anti-CD73 antibodies may also be linked to an Fc having any an amino acid sequence selected from the group consisting of SEQ ID NOs: 234-245 and 247-262.

[0026] In certain embodiments, an antibody comprising a modified heavy chain constant region binds specifically to an inhibitory receptor, e.g., CTLA-4, PD-1, LAG-3, TIM-3, Galectin 9, CEACAM-1, BTLA, CD69, Galectin-1, TIGIT, CD113, GPR56, VISTA, 2B4, CD48, GARP, PD1H, LAIR1, TIM-1 and TIM-4, and comprises a modified heavy chain constant region selected from the group of SEQ ID NOs: 26-37, 54-56, 78-125, 152-232, 234-245 and 247-262. In certain embodiments, the antibody exhibits more potent or altered antagonist activity or introduces a new activity relative to the same antibody having an IgG1 heavy chain constant region. In certain embodiments, the Fc comprises one or more mutations to modulate, e.g., reduce, effector function.

[0027] In certain embodiments, an antibody comprising a modified heavy chain constant region binds specifically to a cell surface molecule and triggers intracellular signaling, wherein the antibody comprises a modified heavy chain constant region selected from the group of SEQ ID NOs: 26-37, 54-56, 78-125, 152-232, 234-245 and 247-262. In certain embodiments, intracellular signaling mediates agonist activity, antagonist activity, internalization of the cell surface molecule, or ADCC. In certain embodiments, the antibody triggers more potent intracellular signaling relative to to an antibody having the same variable regions and light chain, but comprising an IgG1 heavy chain constant region.

[0028] In certain embodiments, an antibody comprising a modified heavy chain constant region binds specifically to a cell surface molecule and triggers formation of high molecular weight antibody-cell surface molecule complexes, wherein the antibody comprises a modified heavy chain constant region selected from the group of SEQ ID NOs: 26-37, 54-56, 78-125, 152-232, 234-245 and 247-262. In certain embodiments, the antibody triggers formation of higher molecular weight complexes relative to an antibody having the same variable regions and light chain, but comprising an IgG1 heavy chain constant region.

[0029] In certain embodiments, an antibody comprising a modified heavy chain constant region binds specifically to a cell surface molecule and triggers clustering or oligomerization of the cell surface molecule, wherein the antibody comprises a modified heavy chain constant region selected from the group of SEQ ID NOs: 26-37, 54-56, 78-125, 152-232, 234-245 and 247-262. In certain embodiments, the antibody triggers more clustering or oligomerization of the cell surface molecule relative to an antibody having the same variable regions and light chain, but comprising an IgG1 heavy chain constant region.

[0030] Also provided herein are bispecific molecules comprising an antibody comprising a modified heavy chain constant region linked to a molecule having a second binding specificity. Also provided herein are immunoconjugates comprising an antibody comprising a modified heavy chain constant region, linked to a second agent. Composition comprising an antibody, bispecific or immunoconjugate described herein and a carrier are also provided. Compositions may comprise one or more additional therapeutic agents, e.g., a therapeutic agent stimulates the immune system, and is, e.g., an antagonist of a checkpoint inhibitor or a co-stimulatory receptor.

[0031] Also provided herein are methods of preparing an antibody comprising a modified heavy chain constant region, wherein the antibody comprises a CH1 domain, a hinge, a CH2 domain, and a CH3 domain in order from N- to C-terminus, comprising the steps of: (a) providing an antibody comprising a hinge and/or a CH1 domain that is not an IgG2 hinge and/or IgG2 CH1 domain; and (b) replacing the hinge and/or the CH1 domain with an IgG2 hinge and/or IgG2 CH1 domain, respectively. Further provided herein are methods of increasing internalization of an antibody by a cell, comprising: (a) providing an antibody comprising a hinge and/or a CH1 domain that is not an IgG2 hinge and/or IgG2 CH1 domain; and (b) replacing the hinge and/or the CH1 domain with an IgG2 hinge and/or IgG2 CH1 domain, respectively. Internalization of the antibody may be increased compared to internalization of the same antibody comprising a hinge of a non-IgG2 isotype, e.g., an antibody comprising an IgG1 constant region. Also provided are methods of increasing the agonist activity of an antibody, comprising: (a) providing an antibody comprising a hinge and/or a CH1 domain that is not an IgG2 hinge and/or IgG2 CH1 domain; and (b) replacing the hinge and/or the CH1 domain with an IgG2 hinge and/or IgG2 CH1 domain, respectively. The agonist activity may be increased compared to agonist activity of the same antibody comprising a hinge of a non-IgG2 isotype, e.g., an antibody comprising an IgG1 constant region. An IgG2 hinge may be a wildtype human IgG2 hinge, or comprises an amino acid sequence that is at least 95% identical to the amino acid sequence of a wildtype human IgG2 hinge and may comprise, e.g., a sequence set forth in Table 4. A method may comprise the step of replacing at least one of the CH1, CH2, or CH3 domains with a CH1, CH2, or CH3 domain of a different isotype, respectively. A method may comprise the steps of (a) replacing the CH1 domain with an IgG2 CH1 domain; (b) replacing the CH2 domain with an IgG1 CH2 domain; and/or (b) replacing the CH3 domain with an IgG1 CH3 domain. A method may comprise the steps of (a) replacing the CH1 domain with a wildtype human IgG2 CH1 domain, or a domain at least 95% identical thereto; (b) replacing the CH2 domain with a wildtype human IgG1 CH2 domain, or a domain at least 95% identical thereto; and/or (b) replacing the CH3 domain with a wildtype human IgG1 CH3 domain, or a domain at least 95% identical thereto. A method may comprise the step of replacing the heavy chain constant region with a modified heavy chain constant region comprising any one of SEQ ID NOs: 26-37, 54-56, 78-125, 152-232, 234-245 and 247-262 or a region at least 95% identical to SEQ ID NOs: 26-37, 54-56, 78-125, 152-232, 234-245 and 247-262 (or introducing into the Fc the amino acid mutations of these sequences). The hinge may be modified to reduce or alter disulfide bond formation. The hinge may comprise amino acid substitution C219S. The hinge may comprise an amino acid sequence set forth in any one of SEQ ID NO: 8, 21-23, 126-132 or 134-147 or a sequence that comprises 1-3 amino acids inserted between CVE and CPP. The CH1 domain may comprise the amino acid sequence ASTKGPSVFPLAPCSRSTSESTAALGCLVKDYFPEPVTVSWNSGALTSGVHTFPAVLQ SSGLYSLSSVVTVPSSNFGTQTYTCNVDHKPSNTKVDKTV (SEQ ID NO: 7). The CH2 domain may be modified to reduce or eliminate effector functions. The CH2 domain may comprise amino acid substitutions A330S and P331S. The CH2 domain may comprise the amino acid sequence PSVFLFPPKPKDTLMISRTPEVTCVVVDVSHEDPEVKFNWYVDGVEVHNAKTKPREE QYNSTYRVVSVLTVLHQDWLNGKEYKCKVSNKALPAPIEKTISKAK (SEQ ID NO: 4). The CH2 domain may comprise amino acid substitutions A330S and P331S. The CH3 domain may comprise the amino acid sequence

(SEQ ID NO: 5)
GQPREPQVYTLPPSREEMTKNQVSLTCLVKGFYPSDIAVEWESNGQPENN
YKTTPPVLDSDGSFFLYSKLTVDKSRWQQGNVFSCSVMHEALHNHYTQKS
LSLSPGK.

[0032] Also provided herein are modified heavy chain constant region with reduced or undetectable binding to one or more FcγRs (e.g., CD16, CD32, CD64). Such modified heavy chain constant regions may have 1-5, 1-3, 1-2 or a single mutation (e.g., substitution) relative to the wildtype heavy chain constant region.

[0033] Also provided are antibodies, or antigen binding portion thereof, produced by the methods described herein, e.g., set forth above, e.g., human or humanized antibodies. Methods of treating a subject, e.g., a subject having cancer, with any of the antibodies described herein are also encompassed herein. The methods may comprise administering one or more additional therapeutic agents, e.g., therapeutic agents that stimulate the immune system. For example, a therapeutic agent may target a checkpoint inhibitor or a co-stimulatory molecule. Methods may include administering a composition, bispecific molecule, or immunoconjugate described herein.

### BRIEF DESCRIPTION OF THE DRAWINGS

[0034] FIG. 1A shows the kinetics of antibody mediated internalization of CD73 in H2228 cells (non-small cell lung carcinoma cell line) by the following antibodies: 11F11, 4C3, 6D11, CD73.3-IgG1.1f with the 4C3Vk1 light chain (“3-Vh-hHC-IgG1.1f/4C3Vk1”), CD73.4-IgG2CS with the 11F11 Vk2 light chain (“4-Vh-hHC-IgG2-C219S/11F11-Vk2”), CD73.10-IgG2CS (“CD73.10-Vh-hHC-IgG2-C219S”), CD73.10-IgG2CS-IgG1.1f (“CD73.10-Vh-hHC-IgG2-C219S-IgG1.1f”), and CD73.10-IgG1.1f (“CD73.10-Vh-hHC-IgG1.1f”) antibodies in H2228 cells. The 11F11 (which is of an IgG2 isotype), CD73.4-IgG2CS, CD73.10-IgG2CS and CD73.10-IgG2CS-IgG1.1f antibodies are internalized faster and to a higher degree than the other tested antibodies, which are of an IgG1 isotype.

[0035] FIG. 1B shows the kinetics of antibody mediated CD73 internalization of the same antibodies as those shown in FIG. 1A in HCC15 cells (non-small cell lung carcinoma cell line), showing similar results to those obtained in H2228 cells.

[0036] FIG. 1C shows the kinetics of antibody mediated CD73 internalization of the same antibodies as those shown in FIGS. 1A and 1B, as well as CD73.11-IgG2CS (“11-Vh-hVC-IgG2-C219S”), in Calu6 cells, showing similar results to those obtained in H2228 and HCC15 cells.

[0037] FIG. 1D shows the kinetics of antibody mediated CD73 internalization of the same antibodies as those shown in FIG. 1C in NCI-2030 cells (non-small cell lung carcinoma cell line), showing similar results to those obtained in H2228, HCC15, and Calu6 cells.

[0038] FIG. 1E shows the kinetics of antibody mediated CD73 internalization of the indicated antibodies in Calu6 cells, as measured by flow cytometry.

[0039] FIG. 1F shows the kinetics of antibody mediated CD73 internalization of the indicated antibodies in NCI-H292 cells (mucoepidermoid pulmonary carcinoma cell line), as measured by flow cytometry, but where the antibodies were not washed out after the first incubation of the cells with the antibodies.

[0040] FIG. 1G shows the percentage of CD73 internalized in Calu6 cells treated with the indicated antibodies, showing antibody mediated CD73 internalization of the indicated antibodies in Calu6 cells over time.

[0041] FIG. 1H shows the percentage of CD73 internalized in NCI-H292 cells treated with the indicated antibodies over time, showing antibody mediated CD73 internalization of the indicated antibodies in NCI-H292 cells over time.

[0042] FIG. 1I shows the percentage of CD73 internalized in SNU-C1 cells (colon carcinoma cell line) treated with the indicated antibodies over time, showing antibody mediated CD73 internalization of the indicated antibodies in SNU-C1 cells over time.

[0043] FIG. 1J shows the percentage of CD73 internalized in NCI-H1437 cells (non-small cell lung carcinoma cell line) treated with the indicated antibodies over time, showing antibody mediated CD73 internalization of the indicated antibodies in NCI-H1437 cells over time.

[0044] FIG. 2 shows the binding kinetics of the indicated anti-human GITR antibodies to anti-CD3 (plate coated) and CD28-activated human CD4 T cells and their corresponding EC50 values derived from the graph.

[0045] FIGS. 3A, 3B and 3C show the secretion of IFN-γ and IL-2 from donor CD4 T cells stimulated with soluble anti-human GITR antibodies with different heavy chain constant regions. FIG. 3A shows IFN-γ secretion from donor CD4 T cells stimulated with OKT3 expressing CHO cells and various concentrations of anti-human GITR antibodies with an IgG2-IgG1 constant region. FIG. 3B shows IL-2 secretion from donor CD4 T cells stimulated with OKT3 expressing CHO cells and various concentrations of an IgG1 heavy chain constant domain or an IgG2-IgG1 hybrid heavy chain constant domain. FIG. 3C shows IL-2 secretion from donor CD4 T cells stimulated with OKT3 expressing CHO cells and various concentrations of effectorless versions (IgG1.1) of the antibodies in FIGS. 3A and B.

[0046] FIG. 4 shows IL-2 secretion from 3A9-hGITR cells cultured on anti-CD3 monoclonal antibody-coated plates in the presence of increasing amounts of the indicated anti-human GITR antibodies: the hybridoma anti-GITR (IgG2) and recombinant derivatives as IgG1f, IgG1.1 (effectorless), or as chimera with the IgG2 hinge.

[0047] FIGS. 5A, 5B, 5C and 5D show the effect of an IgG2 hinge on the size of antibody/antigen complexes. FIGS. 5A, 5B and 5C show SEC chromatogram data, DLS data and MALS data, for complexes of hCD73-his with the antibody CD73.4 containing different constant regions. FIG. 5D shows a schematic model of the hCD73-his/mAb complexes derived from the MALS-determined masses in FIG. 5C.

[0048] FIG. 6 shows SEC-MALS data for CD73/mAb complexes.

[0049] FIG. 7 shows DLS data for CD73/mAb complexes.

[0050] FIG. 8A shows the percentage of CD73 internalized in Calu6 cells treated with the indicated antibodies over time, showing antibody mediated CD73 internalization of the indicated antibodies in Calu6 cells over time.

[0051] FIG. 8B shows the percentage of CD73 internalized in NCI-H292 cells treated with the indicated antibodies over time, showing antibody mediated CD73 internalization of the indicated antibodies in Calu6 cells over time.

[0052] FIG. 8C shows the level of CD73 on the surface of Calu6 cells treated with 5 μg/ml of the indicated antibodies for 0, 5, 15 or 30 minutes.

[0053] FIG. 9 shows the level of IL-2 secreted by CD4+ T cells co-cocultured with CHO-OKT3 cells in the presence of an anti-GITR antibody having the indicated constant regions.

[0054] FIG. 10 shows the percentage of antibody mediated CD73 internalization at 1, 4 or 21 hours after the addition of each of the shown antibodies. The bars for each antibody are shown in the order of 21 hours (on the left), 4 hours (middle) and 1 hour (right).

[0055] FIG. 11A shows overlay of SEC chromatogram data for 1:1 molar complexes of hCD73-his with 16 different CD73.4 antibodies containing different constant region sequences.

[0056] FIG. 11B shows an expansion of the chromatogram data from 11-19.5 min of the chromatogram of FIG. 10A, with 4 distinct elution species indicated.

[0057] FIG. 11C shows the percentage of the UV chromatogram signal area for peak 2 of FIG. 11B, plotted for the 16 different antibody/CD73-his complexes. Data is sorted from left to right in order of increasing peak area.

[0058] FIG. 12 shows antibody binding to anti-his Fab captured FcγR-his proteins. Binding responses are plotted as a percentage of the theoretical Rmax assuming a 1:1 mAb:FcγR binding stoichiometry. The bars for each antibody are shown in the order provided by the color legends at the bottom of the slide.

[0059] FIG. 13 shows antibody binding to anti-his Fab captured FcgR-his proteins. Binding responses are plotted as a percentage of the theoretical Rmax assuming a 1:1 mAb:FcγR binding stoichiometry. The bars for each antibody are shown in the order provided by the color legends at the bottom of the slide.

[0060] FIG. 14A shows antibody binding to anti-his Fab captured FcγR-his proteins. Binding responses are plotted as a percentage of the theoretical Rmax assuming a 1:1 mAb:FcγR binding stoichiometry. The bars for each antibody are shown in the order provided by the color legends at the bottom of the slide.

[0061] FIG. 14B shows antibody binding to anti-his Fab captured FcγR-his proteins. Binding responses are plotted as a percentage of the theoretical Rmax assuming a 1:1 mAb:FcγR binding stoichiometry. The bars for each antibody are shown in the order provided by the color legends at the bottom of the slide.

[0062] FIG. 15 shows an internalization time course analysis of anti-GITR antibodies.

[0063] FIG. 16A shows GITR and early endosome marker EEA2 co-localization analysis at time zero.

[0064] FIG. 16B shows GITR and early endosome marker EEA2 co-localization analysis at time 30 and 120 minutes.

[0065] FIG. 16C shows the results of quantification of endosomal co-localization shown in FIGS. 16A and 16B plotted as the ratio of colocalized pixel intensity relative to total staining.

[0066] FIG. 17A shows NFκB signaling activation in CD8+ T cells treated with the indicated anti-GITR antibodies.

[0067] FIG. 17B shows NFκB signaling activation in CD4+ T cells treated with the indicated anti-GITR antibodies.

[0068] FIG. 18 shows P38 activation in CD4+ T cells treated with the indicated anti-GITR antibodies.

[0069] FIG. 19 shows the configuration of the disulfide bonds in IgG2 antibodies having conformation A, B or A/B.

[0070] FIG. 20A shows the level of IL-2 secreted by CD4+ T cells co-cocultured with CHO-OKT3 cells in the presence of different concentrations of an anti-GITR antibody having the indicated constant regions.

[0071] FIG. 20B shows the level of IL-2 secreted by CD4+ T cells co-cocultured with CHO-OKT3 cells in the presence of 5 μg/ml of an anti-GITR antibody having the indicated constant regions (same experiment as that in FIG. 20A).

[0072] FIG. 20C shows the level of IL-2 secreted by CD4+ T cells co-cocultured with CHO-OKT3 cells in the presence of 1.25 μg/ml of an anti-GITR antibody having the indicated constant regions (same experiment as that in FIG. 20A).

[0073] FIG. 20D shows the level of IL-2 secreted by CD4+ T cells co-cocultured with CHO-OKT3 cells in the presence of 0.313 μg/ml of an anti-GITR antibody having the indicated constant regions (same experiment as that in FIG. 20A).

[0074] FIG. 21 shows the amino acid sequence of a portion of hIgG1f, wherein the underlined sequences are reproduced below and show the location of the mutations in the hIgG1, hIgG1.1f, hIgG1.3f and hIgG1-P238K amino acid sequences relative to wild-type IgG1.

[0075] FIG. 22A, 22B, 22C, 22D, 22E, 22F, 22G, 22H, 22I, 22J, 22K, and 22L show a comparison of the dissociation rates of the antibody Y1238 in the context of different Fc regions from the indicated Fc receptors based on sensorgram data.

[0076] FIGS. 23A, 23B, 23C, 23D, 23E, and 23F show the charge profiles for dAb-Fc molecules as characterized by icIEF.

### DETAILED DESCRIPTION

[0077] In certain embodiments, the invention is based, at least in part, on the findings that the following properties of antibodies are enhanced or altered when the antibodies comprise an IgG2 hinge relative to the same antibodies that comprise a non-IgG2 hinge (or relative to the same antibodies comprising an IgG1 constant region): (i) internalization; (ii) agonist function; (iii) receptor mediated intracellular signaling; (iv) ADCC; and (v) weight of antibody/antigen complexes. In addition, these enhanced or altered features of antibodies are further enhanced or altered when the antibodies comprise, in addition to an IgG2 hinge, an IgG2 CH1 domain. It has also been observed that antibodies having an IgG2 CH1 domain, but not an IgG2 hinge, have enhanced or altered activities compared to the same antibodies having an IgG1 CH1 domain. Without wanting to be limited to a particular mechanism of action, the enhancing effects of an IgG2 hinge has been found to correlate with an increase in size of antibody/antigen complexes. The enhanced size of antibody/antigen complexes when the antibody has an IgG2 hinge may result from a higher rigidity of IgG2 hinges relative to that of other isotypes. Furthermore, it has been shown that specific regions or amino acid residues of the IgG2 hinge and CH1 domain may be modified, whereas others are preferably not modified, to preserve the enhanced or altered activities.

[0078] As further described herein, these modified heavy chain constant regions conferring onto antibodies (or antigen binding regions thereof) enhanced or modified activities may have effector function. Thus, it was shown that antibodies may be created that have the advantageous properties conferred by an IgG2 hinge and/or CH1 domain and also have effector function.

[0079] The invention is also based at least in part on the finding that deletion of certain portions of a hinge in an IgG1 or IgG2 antibody results in the antibody having enhanced or altered properties relative to the antibody with an IgG1 constant region.

[0080] Also described herein are modified heavy chain regions that have mutations that reduce ADCC and/or CDC effector function, e.g., a P238 mutation, e.g., P238K, and in some some embodiments, such one or more mutation is combined with a mutation that enhances (i) internalization; (ii) agonist function; (iii) receptor mediated intracellular signaling; (iv) ADCC; and/or (v) weight of antibody/antigen complexes.

[0081] Accordingly, provided herein are (i) antibodies having modified heavy chain constant regions conferring to the antigen binding regions of the antibodies enhanced or altered properties and methods of using them, and (ii) methods for enhancing or altering certain biological properties of antibodies that comprise a non-IgG2 hinge and/or CH1 domain, such as internalization, agonism and antagonism, wherein the method comprises replacing the non-IgG2 hinge and/or CH1 domain of the antibody with an IgG2 hinge and/or IgG2 CH1 domain or portion thereof.

[0082] Provided herein are “modified heavy chain constant regions” that enhance certain biological properties of antibodies, e.g., antibodies that have a non-IgG2 hinge and/or a non-IgG2 CH1 domain, relative to the same antibodies having different constant regions. Exemplary modified heavy chain constant regions include an IgG2 hinge, a CH1 domain, a CH2 domain and a CH3 domain, wherein at least one of these constant domains is not of the IgG2 isotype and may be, e.g., of an IgG1, IgG3 or IgG4. In certain embodiments, a modified heavy chain constant region comprises an IgG2 hinge and IgG1 CH2 and CH3 domains. In certain embodiments, a modified heavy chain constant region comprises an IgG2 CH1 domain and an IgG2 hinge. In certain embodiments, a modified heavy chain constant region comprises an IgG2 CH1 domain, an IgG2 hinge, an IgG1 CH2 domain and an IgG1 CH3 domain. A modified heavy chain constant region may have effector function similar to that of wild-type IgG1, or may be engineered to have reduced or enhanced effector function relative to that of the wildtype IgG. A modified heavy chain constant region may comprise a wildtype CH1, hinge, CH2 and/or CH3 domain, or a variant thereof, e.g., a CH1, hinge, CH2 and/or CH3 domain having one or more amino acid substitutions, deletions or additions relative to the corresponding wildtype domain, and/or having an amino acid sequence that is at least 90% identical, or more, to the corresponding wildtype sequence.

[0083] Also provided are antibodies and fusion proteins comprising an IgG1.3 heavy chain constant region. An antibody comprising an IgG1.3 heavy chain constant region may be an antagonist or an agonist antibody, such as a an antagonist antibody to a checkpoint inhibitor or an agonist antibody to a checkpoint stimulator.

### Definitions

[0084] In order that the present description may be more readily understood, certain terms are first defined. Additional definitions are set forth throughout the detailed description.

[0085] The term “antibody” as used herein may include whole antibodies and any antigen binding fragments (e.g., an antigen binding fragment that includes a hinge, an antigen binding fragment that includes a hinge and a CH1 domain, an antigen binding fragment that includes a hinge and CH2 domain, or an antigen binding fragment that includes a hinge, a CH2 domain and a portion of a CH3 domain) or single chains thereof. In one embodiment, an “antibody” refers to a protein, e.g., a glycoprotein, comprising at least two heavy (H) chains and two light (L) chains inter-connected by disulfide bonds, or an antigen binding portion thereof. Each heavy chain is comprised of a heavy chain variable region (abbreviated herein as VH) and a heavy chain constant region. In certain naturally occurring IgG, IgD and IgA antibodies, the heavy chain constant region is comprised of a hinge, a CH1 domain, a CH2 domain and a CH3 domain. In certain naturally occurring antibodies, each light chain is comprised of a light chain variable region (abbreviated herein as VL) and a light chain constant region. The light chain constant region is comprised of one domain, CL. The VH and VL regions can be further subdivided into regions of hypervariability, termed complementarity determining regions (CDR), interspersed with regions that are more conserved, termed framework regions (FR). Each VH and VL is composed of three CDRs and four FRs, arranged from amino-terminus to carboxy-terminus in the following order: FR1, CDR1, FR2, CDR2, FR3, CDR3, FR4. The variable regions of the heavy and light chains contain a binding domain that interacts with an antigen. The constant regions of the antibodies may mediate the binding of the immunoglobulin to host tissues or factors, including various cells of the immune system (e.g., effector cells) and the first component (Clq) of the classical complement system.

[0086] An immunoglobulin may be from any of the commonly known isotypes, including but not limited to IgA, secretory IgA, IgG and IgM. The IgG isotype is divided in subclasses in certain species: IgG1, IgG2, IgG3 and IgG4 in humans, and IgG1, IgG2a, IgG2b and IgG3 in mice. In certain embodiments, the antibodies described herein are of the human IgG1 or IgG2 subtype. Immunoglobulins, e.g., human IgG1, exist in several allotypes, which differ from each other in at most a few amino acids. “Antibody” may include, by way of example, both naturally occurring and non-naturally occurring antibodies; monoclonal and polyclonal antibodies; chimeric and humanized antibodies; human and nonhuman antibodies; wholly synthetic antibodies; and single chain antibodies.

[0087] In certain embodiments, a heavy chain of an antibody comprises a C-terminal lysine; a C-terminal glycine (having lost the C-terminal lysine), or is lacking GK or is lacking K. When referring to antibodies comprising a modified heavy chain constant region described herein, the antibody may comprise a provided sequence having the C-terminal GK or K, or alternatively, lacking GK or K.

[0088] Amino acid numbering is according to the EU index as in Kabat. Kabat et al. (1991) Sequences of Proteins of Immunological Interest, National Institutes of Health, Bethesda, Md., and according to FIGS. 3c-3f of U.S. Pat. App. Pub. No. 2008/0248028.

[0089] The term “antigen-binding portion” of an antibody, as used herein, refers to one or more fragments of an antibody that retain the ability to specifically bind to an antigen. An antigen-binding portion of an antibody can be a “hinge containing antigen binding portion.” It has been shown that the antigen-binding function of an antibody can be performed by fragments of a full-length antibody. Examples of binding fragments encompassed within the term “antigen-binding portion” of an antibody described herein, include (i) a Fab fragment, a monovalent fragment consisting of the VL, VH, CL and CH1 domains; (ii) a F(ab′)₂ fragment, a bivalent fragment comprising two Fab fragments linked by a disulfide bridge at the hinge region; (iii) a Fd fragment consisting of the VH and CH1 domains; (iv) a Fv fragment consisting of the VL and VH domains of a single arm of an antibody, (v) a dAb fragment (Ward et al., (1989) Nature 341:544-546), which consists of a VH domain; and (vi) an isolated complementarity determining region (CDR) or (vii) a combination of two or more isolated CDRs which may optionally be joined by a synthetic linker. Furthermore, although the two domains of the Fv fragment, VL and VH, are coded for by separate genes, they can be joined, using recombinant methods, by a synthetic linker that enables them to be made as a single protein chain in which the VL and VH regions pair to form monovalent molecules known as single chain Fv (scFv); see e.g., Bird et al. (1988) Science 242:423-426; and Huston et al. (1988) Proc. Natl. Acad. Sci. USA 85:5879-5883). Such single chain antibodies are also intended to be encompassed within the term “antigen-binding portion” of an antibody. These and other potential constructs are described at Chan & Carter (2010) Nat. Rev. Immunol. 10:301. These antibody fragments are obtained using conventional techniques known to those with skill in the art, and the fragments are screened for utility in the same manner as are intact antibodies. Antigen-binding portions can be produced by recombinant DNA techniques, or by enzymatic or chemical cleavage of intact immunoglobulins.

[0090] A “CDR” of a variable domain are amino acid residues within the hypervariable region that are identified in accordance with the definitions of the Kabat, Chothia, the combination of both Kabat and Chothia, AbM, contact, and/or conformational definitions or any method of CDR determination well known in the art. Antibody CDRs may be identified as the hypervariable regions originally defined by Kabat et al. See, e.g., Kabat et al., 1992, Sequences of Proteins of Immunological Interest, 5th ed., Public Health Service, NIH, Washington D.C. The positions of the CDRs may also be identified as the structural loop structures originally described by Chothia and others. See, e.g., Chothia et al., 1989, Nature 342:877-883. Other approaches to CDR identification include the “AbM definition,” which is a compromise between Kabat and Chothia and is derived using Oxford Molecular's AbM antibody modeling software (now Accelrys®), or the “contact definition” of CDRs based on observed antigen contacts, set forth in MacCallum et al., 1996, J. Mol. Biol., 262:732-745. In another approach, referred to herein as the “conformational definition” of CDRs, the positions of the CDRs may be identified as the residues that make enthalpic contributions to antigen binding. See, e.g., Makabe et al., 2008, Journal of Biological Chemistry, 283:1156-1166. Still other CDR boundary definitions may not strictly follow one of the above approaches, but will nonetheless overlap with at least a portion of the Kabat CDRs, although they may be shortened or lengthened in light of prediction or experimental findings that particular residues or groups of residues or even entire CDRs do not significantly impact antigen binding. As used herein, a CDR may refer to CDRs defined by any approach known in the art, including combinations of approaches. The methods used herein may utilize CDRs defined according to any of these approaches. For any given embodiment containing more than one CDR, the CDRs may be defined in accordance with any of Kabat, Chothia, extended, AbM, contact, and/or conformational definitions.

[0091] As used herein, “isotype” refers to the antibody class (e.g., IgG1, IgG2, IgG3, IgG4, IgM, IgA1, IgA2, IgD, and IgE antibody) that is encoded by the heavy chain constant domain genes. The full-length amino acid sequence of each wild type human IgG constant region (including all domains, i.e., CH1 domain, hinge, CH2 domain, and CH3 domain) is cataloged in the UniProt database available on-line, e.g., as P01857 (IgG1), P01859 (IgG2), P01860 (IgG3), and P01861 (IgG4), or different allotypes thereof (SEQ ID NOs: 1, 6, 11, and 16, respectively). As used herein, a domain of a heavy chain constant region, e.g., the hinge, is of an “IgG1 isotype,” “IgG2 isotype,” “IgG3 isotype,” or “IgG4 isotype,” if the domain comprises the amino acid sequence of the corresponding domain of the respective isotype, or a variant thereof (that has a higher homology to the corresponding domain of the respective isotype than it does to that of the other isotypes).

[0092] “Allotype” refers to naturally occurring variants within a specific isotype group, which variants differ in a few amino acids (see, e.g., Jefferies et al. (2009) mAbs 1:1). Antibodies described herein may be of any allotype.

[0093] A “wildtype” protein or portion thereof is a version of the protein as it is found in nature. An amino acid sequence of a wildtype protein, e.g., a heavy chain constant region, is the amino acid sequence of the protein as it occurs in nature. Due to allotypic differences, there can be more than one amino acid sequence for a wildtype protein. For example, there are several allotypes of naturally occurring human IGg1 heavy chain constant regions (see, e.g., Jeffries et al. (2009) mAbs 1:1).

[0094] An “Fc region” (fragment crystallizable region) or “Fc domain” or “Fc” refers to the C-terminal region of the heavy chain of an antibody that mediates the binding of the immunoglobulin to host tissues or factors, including binding to Fc receptors located on various cells of the immune system (e.g., effector cells) or to the first component (Clq) of the classical complement system. Thus, an Fc region of an antibody of isotype IgG comprises the heavy chain constant region of the antibody excluding the first constant region immunoglobulin domain (CH1). In IgG, IgA and IgD antibody isotypes, the Fc region comprises CH2 and CH3 constant domains in each of the antibody's two heavy chains; IgM and IgE Fc regions comprise three heavy chain constant domains (CH domains 2-4) in each polypeptide chain. For IgG, the Fc region comprises immunoglobulin domains consisting of the hinge, CH2 and CH3. For purposes herein, the Fc region is defined as starting at amino acid 216 and ending at amino acid 447, wherein the numbering is according to the EU index as in Kabat. Kabat et al. (1991) Sequences of Proteins of Immunological Interest, National Institutes of Health, Bethesda, Md., and according to FIGS. 3c-3f of U.S. Pat. App. Pub. No. 2008/0248028. The Fc may be a native (or naturally-occurring or wildtype) Fc, including any allotypic variant, or a variant Fc (e.g., a non-naturally occurring Fc), comprising, e.g., 1, 2, 3, 4, 5, 1-5, 1-10 or 5-10 or more amino acid mutations, e.g., substitutions, additions or deletions. For example, a variant Fc may comprise an amino acid sequence that is at least 75%, 80%, 85%, 90%, 95%, 96%, 97%, 98% or 99% identical to a wildtype Fc. Modified or mutated Fcs may have enhanced or reduced effector function and/or half-life. The CH2 and CH3 regions are the primary site of effector functions and FcRn binding. Fc may refer to this region in isolation or in the context of an Fc-comprising protein polypeptide such as a “binding protein comprising an Fc region,” also referred to as an “Fc fusion protein” (e.g., an antibody or immunoadhesin).

[0095] An “effector function” refers to the interaction of an antibody Fc region with an Fc receptor or ligand, or a biochemical event that results therefrom. Exemplary “effector functions” include Clq binding, complement dependent cytotoxicity (CDC), Fc receptor binding, FcγR-mediated effector functions such as ADCC and antibody dependent cell-mediated phagocytosis (ADCP), and downregulation of a cell surface receptor (e.g., the B cell receptor; BCR). Such effector functions generally require the Fc region to be combined with a binding domain (e.g., an antibody variable domain).

[0096] An “Fc receptor” or “FcR” is a receptor that binds to the Fc region of an immunoglobulin. FcRs that bind to an IgG antibody comprise receptors of the FcγR family, including allelic variants and alternatively spliced forms of these receptors. The FcγR family consists of three activating (FcγRI, FcγRIII, and FcγRIV in mice; FcγRIA, FcγRIIA, and FcγRIIIA in humans) and one inhibitory (FcγRIIB) receptor. Various properties of human FcγRs are summarized in Table 1. The majority of innate effector cell types coexpress one or more activating FcγR and the inhibitory FcγRIIB, whereas natural killer (NK) cells selectively express one activating Fc receptor (FcγRIII in mice and FcγRIIIA in humans) but not the inhibitory FcγRIIB in mice and humans. Human IgG1 binds to most human Fc receptors and is considered equivalent to murine IgG2a with respect to the types of activating Fc receptors that it binds to.

TABLE 1
Properties of human FcγRs

| | Allelic | Affinity for | | Cellular |
|---|---|---|---|---|
| Fcγ | variants | human IgG | Isotype preference | distribution |
| FcγRI | None | High | IgG1 = 3 > 4 >> 2 | Monocytes, |
| (CD64) | described | (K_{D}~10 | | macrophages, |
| | | nM) | | activated |
| | | | | neutrophils, |
| | | | | dendritic cells? |
| FcγRIIA | H131 | Low to | IgG1 > 3 > 2 > 4 | Neutrophils, |
| | | medium | | monocytes, |
| (CD32a) | R131 | Low | IgG1 > 3 > 4 > 2 | macrophages, |
| | | | | eosinophils, |
| | | | | dendritic cells, |
| | | | | platelets |
| FcγRIIIA | V158 | Medium | IgG1 = 3 >> 4 > 2 | NK cells, |
| CD16a) | F158 | Low | IgG1 = 3 >> 4 > 2 | monocytes, |
| | | | | macrophages, |
| | | | | mast cells, |
| | | | | eosinophils, |
| | | | | dendritic cells? |
| FcγRIIB | I232 | Low | IgG1 = 3 = 4 > 2 | B cells, |
| (CD32b) | T232 | Low | IgG1 = 3 = 4 > 2 | monocytes, |
| | | | | macrophages, |
| | | | | dendritic cells, |
| | | | | mast cells |

[0097] A “hinge”, “hinge domain” or “hinge region” or “antibody hinge region” refers to the domain of a heavy chain constant region that joins the CH1 domain to the CH2 domain and includes the upper, middle, and lower portions of the hinge (Roux et al. J. Immunol. 1998 161:4083). The hinge provides varying levels of flexibility between the binding and effector regions of an antibody and also provides sites for intermolecular disulfide bonding between the two heavy chain constant regions. As used herein, a hinge starts at Glu216 and ends at Gly237 for all IgG isotypes (Roux et al., 1998 J Immunol 161:4083). The sequences of wildtype IgG1, IgG2, IgG3 and IgG4 hinges are shown in Table 2.

TABLE 2
Hinge region amino acids

| Ig Type | C-terminal C_{H}1* | Upper Hinge | Middle Hinge | Lower Hinge |
|---|---|---|---|---|
| IgG1 | VDKRV | EPKSCDKTHT | CPPCP | APELLGG |
| | (SEQ ID NO: 57) | (SEQ ID NO: 59) | (SEQ ID NO: 64) | (SEQ ID NO: 70) |
| IgG2 | VDKTV | ERK | CCVECPPCP | APPVAG |
| | (SEQ ID NO: 58) | (SEQ ID NO: 60) | (SEQ ID NO: 65) | (SEQ ID NO: 71) |
| IgG3 | VDKRV | ELKTPLGDTTHT | CPRCP | APELLGG |
| (17-15-15-15) | (SEQ ID NO: 57) | (SEQ ID NO: 61) | (SEQ ID NO: 66) | (SEQ ID NO: 70) |
| | | | (EPKSCDTPPPCPRCP | |
| | | | (SEQ ID NO: 67))₃ | |
| IgG3 | VDKRV | ELKTPLGDTTHT | CPRCP | APELLGG |
| (17-15-15) | (SEQ ID NO: 57) | (SEQ ID NO: 61) | (SEQ ID NO: 66) | (SEQ ID NO: 70) |
| | | | (EPKSCDTPPPCPRCP | |
| | | | (SEQ ID NO: 67))₂ | |
| IgG3 | VDKRV | ELKTPLGDTTHT | CPRCP | APELLGG |
| (17-15) | (SEQ ID NO: 57) | (SEQ ID NO: 61) | (SEQ ID NO: 66) | (SEQ ID NO: 70) |
| | | | (EPKSCDTPPPCPRCP | |
| | | | (SEQ ID NO: 67))₁ | |
| IgG3 | VDKRV | EPKS | CDTPPPCPRCP | APELLGG |
| (15-15-15) | (SEQ ID NO: 57) | (SEQ ID NO: 62) | (SEQ ID NO: 68) | (SEQ ID NO: 70) |
| | | | (EPKSCDTPPPCPRCP | |
| | | | (SEQ ID NO: 67))₂ | |
| IgG3 | VDKRV | EPKS | CDTPPPCPRCP | APELLGG |
| (15) | (SEQ ID NO: 57) | (SEQ ID NO: 62) | (SEQ ID NO: 68) | (SEQ ID NO: 70) |
| IgG4 | VDKRV | ESKYGPP | CPSCP | APEFLGG |
| | (SEQ ID NO: 57) | (SEQ ID NO: 63) | (SEQ ID NO: 69) | (SEQ ID NO: 70) |

*C-terminal amino acid sequences of the CH1 domains.

[0098] The term “hinge” includes wildtype hinges (such as those set forth in Table 3), as well as variants thereof (e.g., non-naturally-occurring hinges or modified hinges). For example, the term “IgG2 hinge” includes wildtype IgG2 hinge, as shown in Table 3, and variants having 1, 2, 3, 4, 5, 1-3, 1-5, 3-5 and/or at most 5, 4, 3, 2, or 1 mutations, e.g., substitutions, deletions or additions. Exemplary IgG2 hinge variants include IgG2 hinges in which 1, 2, 3 or all 4 cysteines (C219, C220, C226 and C229) are changed to another amino acid. In a specific embodiment, an IgG2 hinge comprises a C219X or C220X substitution, wherein X is any amino acid, except cysteine. An IgG2 hinge may comprise a substitution, which alone, or together with one or more substitutions in other regions of the heavy or light chain will cause the antibody comprising the hinge to adopt form A or B (see, e.g., Allen et al. (2009) Biochemistry 48:3755). In certain embodiments, a hinge is a hybrid hinge that comprises sequences from at least two isotypes. For example, a hinge may comprise the upper, middle or lower hinge from one isotype and the remainder of the hinge from one or more other isotypes. For example, a hinge can be an IgG2/IgG1 hinge, and may comprise, e.g., the upper and middle hinges of IgG2 and the lower hinge of IgG1. A hinge may have effector function or be deprived of effector function. For example, the lower hinge of wildtype IgG1 provides effector function.

[0099] A “non-IgG2” hinge refers to a hinge that is not of the IgG2 isotype.

[0100] The term “CH1 domain” refers to the heavy chain constant region linking the variable domain to the hinge in a heavy chain constant domain. As used herein, a CH1 domain starts at A118 and ends at V215. The term “CH1 domain” includes wildtype CH1 domains (such as having SEQ ID NO: 2 for IgG1 and SEQ ID NO: 7 for IgG2; Table 3), as well as variants thereof (e.g., non-naturally-occurring CH1 domains or modified CH1 domains). For example, the term “CH1 domain” includes wildtype CH1 domains and variants thereof having 1, 2, 3, 4, 5, 1-3, 1-5, 3-5 and/or at most 5, 4, 3, 2, or 1 mutations, e.g., substitutions, deletions or additions. Exemplary CH1 domains include CH1 domains with mutations that modify a biological activity of an antibody, such as ADCC, CDC or half-life. Modifications to the CH1 domain that affect a biological activity of an antibody are provided herein.

[0101] The term “CH2 domain” refers to the heavy chain constant region linking the hinge to the CH3 domain in a heavy chain constant domain. As used herein, a CH2 domain starts at P238 and ends at K340. The term “CH2 domain” includes wildtype CH2 domains (such as having SEQ ID NO: 4 for IgG1; Table 3), as well as variants thereof (e.g., non-naturally-occurring CH2 domains or modified CH2 domains). For example, the term “CH2 domain” includes wildtype CH2 domains and variants thereof having 1, 2, 3, 4, 5, 1-3, 1-5, 3-5 and/or at most 5, 4, 3, 2, or 1 mutations, e.g., substitutions, deletions or additions. Exemplary CH2 domains include CH2 domains with mutations that modify a biological activity of an antibody, such as ADCC, CDC or half-life. In certain embodiments, a CH2 domain comprises the substitutions A330S/P331S that reduce effector function. Other modifications to the CH2 domain that affect a biological activity of an antibody are provided herein.

[0102] The term “CH3 domain” refers to the heavy chain constant region that is C-terminal to the CH2 domain in a heavy chain constant domain. As used herein, a CH3 domain starts at G341 and ends at K447. The term “CH3 domain” includes wildtype CH3 domains (such as having SEQ ID NO: 5 for IgG1; Table 3), as well as variants thereof (e.g., non-naturally-occurring CH3 domains or modified CH3 domains). For example, the term “CH3 domain” includes wildtype CH3 domains and variants thereof having 1, 2, 3, 4, 5, 1-3, 1-5, 3-5 and/or at most 5, 4, 3, 2, or 1 mutations, e.g., substitutions, deletions or additions. Exemplary CH3 domains include CH3 domains with mutations that modify a biological activity of an antibody, such as ADCC, CDC or half-life. Modifications to the CH3 domain that affect a biological activity of an antibody are provided herein.

TABLE 3

| Domain | Amino acid sequence | SEQ ID NO: |
|---|---|---|
| IgG1 CH1 | ASTKGPSVFPLAPSSKSTSGGTAALGCLVKDYFPEPVTVSWNSGALTSGVHTFPAVLQS | 2 |
| | SSGLYSLSSVVTVPSSSLGTQTYICNVNHKPSNTKVDKKV | |
| IgG1 Hinge | EPKSCDKTHTCPPCPAPELLGG | 3 |
| IgG1 CH2 | PSVFLFPPKPKDTLMISRTPEVTCVVVDVSHEDPEVKFNWYVDGVEVHNAKTKPREEQY | 4 |
| | NSTYRVVSVLTVLHQDWLNGKEYKCKVSNKALPAPIEKTISKAK | |
| IgG1 CH3 | GQPREPQVYTLPPSREEMTKNQVSLTCLVKGFYPSDIAVEWESNGQPENNYKTTPPVLD | 5 |
| | SDGSFFLYSKLTVDKSRWQQGNVFSCSVMHEALHNHYTQKSLSLSPGK | |
| IgG2 CH1 | ASTKGPSVFPLAPCSRSTSESTAALGCLVKDYFPEPVTVSWNSGALTSGVHTFPAVLQS | 7 |
| | SGLYSLSSVVTVPSSNFGTQTYTCNVDHKPSNTKVDKTV | |
| IgG2 Hinge | ERKCCVECPPCPAPPVAG | 8 |
| IgG2 CH2 | PSVFLFPPKPKDTLMISRTPEVTCVVVDVSHEDPEVQFNWYVDGVEVHNAKTKPREEQF | 9 |
| | NSTFRVVSVLTVVHQDWLNGKEYKCKVSNKGLPAPIEKTISKTK | |
| IgG2 CH3 | GQPREPQVYTLPPSREEMTKNQVSLTCLVKGFYPSDIAVEWESNGQPENNYKTTPPMLD | 10 |
| | SDGSFFLYSKLTVDKSRWQQGNVFSCSVMHEALHNHYTQKSLSLSPGK | |
| IgG3 CH1 | ASTKGPSVFPLAPCSRSTSGGTAALGCLVKDYFPEPVTVSWNSGALTSGVHTFPAVLQS | 12 |
| | SGLYSLSSVVTVPSSSLGTQTYTCNVNHKPSNTKVDKRV | |
| IgG3 Hinge | ELKTPLGDTTHTCPRCPE | 13 |
| IgG3 CH2 | PKSCDTPPPCPRCPEPKSCDTPPPCPRCPEPKSCDTPPPCPRCPAPELLGGPSVFLFPP | 14 |
| | KPKDTLMISRTPEVTCVVVDVSHEDPEVQFKWYVDGVEVHNAKTKPREEQYNSTFRVVS | |
| | VLTVLHQDWLNGKEYKCKVSNKALPAPIEKTISKTK | |
| IgG3 CH3 | GQPREPQVYTLPPSREEMTKNQVSLTCLVKGFYPSDIAVEWESSGQPENNYNTTPPMLD | 15 |
| | SDGSFFLYSKLTVDKSRWQQGNIFSCSVMHEALHNRFTQKSLSLSPGK | |
| IgG4 CH1 | ASTKGPSVFPLAPCSRSTSESTAALGCLVKDYFPEPVTVSWNSGALTSGVHTFPAVLQS | 17 |
| | SGLYSLSSVVTVPSSSLGTKTYTCNVDHKPSNTKVDKRV | |
| IgG4 Hinge | ESKYGPPCPSCPAPEFLGG | 18 |
| IgG4 CH2 | PSVFLFPPKPKDTLMISRTPEVTCVVVDVSQEDPEVQFNWYVDGVEVHNAKTKPREEQF | |
| | NSTYRVVSVLTVLHQDWLNGKEYKCKVSNKGLPSSIEKTISKAK | |
| IgG4 CH3 | GQPREPQVYTLPPSQEEMTKNQVSLTCLVKGFYPSDIAVEWESNGQPENNYKTTPPVLD | 20 |
| | SDGSFFLYSRLTVDKSRWQEGNVFSCSVMHEALHNHYTQKSLSLSLGK | |

[0103] The term “monoclonal antibody,” as used herein, refers to an antibody that displays a single binding specificity and affinity for a particular epitope or a composition of antibodies in which all antibodies display a single binding specificity and affinity for a particular epitope. Typically such monoclonal antibodies will be derived from a single cell or nucleic acid encoding the antibody, and will be propagated without intentionally introducing any sequence alterations. Accordingly, the term “human monoclonal antibody” refers to a monoclonal antibody that has variable and optional constant regions derived from human germline immunoglobulin sequences. In one embodiment, human monoclonal antibodies are produced by a hybridoma, for example, obtained by fusing a B cell obtained from a transgenic or transchromosomal non-human animal (e.g., a transgenic mouse having a genome comprising a human heavy chain transgene and a light chain transgene), to an immortalized cell.

[0104] The term “recombinant human antibody,” as used herein, includes all human antibodies that are prepared, expressed, created or isolated by recombinant means, such as (a) antibodies isolated from an animal (e.g., a mouse) that is transgenic or transchromosomal for human immunoglobulin genes or a hybridoma prepared therefrom, (b) antibodies isolated from a host cell transformed to express the antibody, e.g., from a transfectoma, (c) antibodies isolated from a recombinant, combinatorial human antibody library, and (d) antibodies prepared, expressed, created or isolated by any other means that involve splicing of human immunoglobulin gene sequences to other DNA sequences. Such recombinant human antibodies comprise variable and constant regions that utilize particular human germline immunoglobulin sequences are encoded by the germline genes, but include subsequent rearrangements and mutations that occur, for example, during antibody maturation. As known in the art (see, e.g., Lonberg (2005) Nature Biotech. 23(9):1117-1125), the variable region contains the antigen binding domain, which is encoded by various genes that rearrange to form an antibody specific for a foreign antigen. In addition to rearrangement, the variable region can be further modified by multiple single amino acid changes (referred to as somatic mutation or hypermutation) to increase the affinity of the antibody to the foreign antigen.

[0105] The constant region will change in further response to an antigen (i.e., isotype switch). Therefore, the rearranged and somatically mutated nucleic acid sequences that encode the light chain and heavy chain immunoglobulin polypeptides in response to an antigen may not be identical to the original germline sequences, but instead will be substantially identical or similar (i.e., have at least 80% identity).

[0106] A “human” antibody (HuMAb) refers to an antibody having variable regions in which both the framework and CDR regions are derived from human germline immunoglobulin sequences. Furthermore, if the antibody contains a constant region, the constant region also is derived from human germline immunoglobulin sequences. The antibodies described herein may include amino acid residues not encoded by human germline immunoglobulin sequences (e.g., mutations introduced by random or site-specific mutagenesis in vitro or by somatic mutation in vivo). However, the term “human antibody”, as used herein, is not intended to include antibodies in which CDR sequences derived from the germline of another mammalian species, such as a mouse, have been grafted onto human framework sequences. The terms “human” antibodies and “fully human” antibodies and are used synonymously.

[0107] A “humanized” antibody refers to an antibody in which some, most or all of the amino acids outside the CDR domains of a non-human antibody are replaced with corresponding amino acids derived from human immunoglobulins. In one embodiment of a humanized form of an antibody, some, most or all of the amino acids outside the CDR domains have been replaced with amino acids from human immunoglobulins, whereas some, most or all amino acids within one or more CDR regions are unchanged. Small additions, deletions, insertions, substitutions or modifications of amino acids are permissible as long as they do not abrogate the ability of the antibody to bind to a particular antigen. A “humanized” antibody retains an antigenic specificity similar to that of the original antibody.

[0108] A “chimeric antibody” refers to an antibody in which the variable regions are derived from one species and the constant regions are derived from another species, such as an antibody in which the variable regions are derived from a mouse antibody and the constant regions are derived from a human antibody.

[0109] A “bispecific” or “bifunctional antibody” is an artificial hybrid antibody having two different heavy/light chain pairs, giving rise to two antigen binding sites with specificity for different antigens. Bispecific antibodies can be produced by a variety of methods including fusion of hybridomas or linking of Fab′ fragments. See, e.g., Songsivilai & Lachmann, Clin. Exp. Immunol. 79:315-321 (1990); Kostelny et al., J. Immunol. 148, 1547-1553 (1992).

[0110] The phrases “an antibody recognizing an antigen” and “an antibody specific for an antigen” are used interchangeably herein with the term “an antibody which binds specifically to an antigen.”

[0111] An “isolated antibody,” as used herein, is intended to refer to an antibody that is substantially free of other antibodies having different antigenic specificities (e.g., an isolated antibody that specifically binds to antigen “x” is substantially free of antibodies that specifically bind antigens other than antigen “x”). An isolated antibody that specifically binds to an epitope of antigen “x” may, however, have cross-reactivity to other antigen “x” proteins from different species.

[0112] As used herein, an “agonist antibody” refers to an antibody that is an agonist of a co-stimulatory receptor, e.g., an antibody that is capable of boosting the immune system (or an immune response) of a subject by stimulating the activity of a protein that, in turn, stimulates an immune cell, e.g., a T cell, such as a B7-1, B7-2, CD28, 4-1BB (CD137), 4-1BBL, GITR, ICOS, ICOS-L, OX40, OX40L, CD70, or CD27, DR3, or CD28H protein. In certain embodiments, an agonist antibody is an antibody that enhances the activity of an inhbibitory receptor, e.g., CTLA-4, PD-1, PD-L1, PD-L2, or LAG-3, TIM-3, Galectin 9, CEACAM-1, BTLA, CD69, Galectin-1, TIGIT, CD113, GPR56, VISTA, 2B4, CD48, GARP, CD73, PD1H, LAIR1, TIM-1, or TIM-4, and thereby inhibits an immune response.

[0113] As used herein, an “antagonist antibody” refers to an antibody that is an antagonist of an inhibitory signal on an immune cell, e.g., a T cell, e.g., an antibody that is capable of inhibiting or blocking a protein that inhibits T cell activation (e.g., immune checkpoint inhibitors), such as a CTLA-4, PD-1, PD-L1, PD-L2, or LAG-3, TIM-3, Galectin 9, CEACAM-1, BTLA, CD69, Galectin-1, TIGIT, CD113, GPR56, VISTA, 2B4, CD48, GARP, CD73, PD1H, LAIR1, TIM-1, or TIM-4, and thereby stimulates an immune response. In certain embodiments, an antagonist antibody is an antibody that inhibits the activity of a stimulatory receptor, e.g., B7-1, B7-2, CD28, 4-1BB (CD137), 4-1BBL, GITR, ICOS, ICOS-L, OX40, OX40L, CD70, or CD27, DR3, or CD28H, and thereby inhibits an immune response.

[0114] Both agonist and antagonist antibodies result in amplifying antigen-specific T cell responses, or in inhibiting antigen-specific T cell responses (immune checkpoint regulators).

[0115] The term “epitope” or “antigenic determinant” refers to a site on an antigen (e.g., GITR) to which an immunoglobulin or antibody specifically binds. Epitopes within protein antigens can be formed both from contiguous amino acids (usually a linear epitope) or noncontiguous amino acids juxtaposed by tertiary folding of the protein (usually a conformational epitope). Epitopes formed from contiguous amino acids are typically, but not always, retained on exposure to denaturing solvents, whereas epitopes formed by tertiary folding are typically lost on treatment with denaturing solvents. An epitope typically includes at least 3, 4, 5, 6, 7, 8, 9, 10, 11, 12, 13, 14 or 15 amino acids in a unique spatial conformation. Methods for determining what epitopes are bound by a given antibody (i.e., epitope mapping) are well known in the art and include, for example, immunoblotting and immunoprecipitation assays, wherein overlapping or contiguous peptides from are tested for reactivity with a given antibody. Methods of determining spatial conformation of epitopes include techniques in the art and those described herein, for example, x-ray crystallography, 2-dimensional nuclear magnetic resonance and HDX-MS (see, e.g., Epitope Mapping Protocols in Methods in Molecular Biology, Vol. 66, G. E. Morris, Ed. (1996)).

[0116] The term “naturally-occurring” as used herein as applied to an object refers to the fact that an object can be found in nature. For example, a polypeptide or polynucleotide sequence that is present in an organism (including viruses) that can be isolated from a source in nature and which has not been intentionally modified by man in the laboratory is naturally-occurring.

[0117] A “polypeptide” refers to a chain comprising at least two consecutively linked amino acid residues, with no upper limit on the length of the chain. One or more amino acid residues in the protein may contain a modification such as, but not limited to, glycosylation, phosphorylation or a disulfide bond. A “protein” may comprise one or more polypeptides.

[0118] The term “nucleic acid molecule,” as used herein, is intended to include DNA molecules and RNA molecules. A nucleic acid molecule may be single-stranded or double-stranded, and may be cDNA.

[0119] Also provided are “conservative sequence modifications” of the sequences set forth herein include, for example, conservative nucleotide and amino acid substitutions, as well as, nucleotide and amino acid additions and deletions. For example, modifications can be introduced into SEQ ID NOs: 1-74 by standard techniques known in the art, such as site-directed mutagenesis and PCR-mediated mutagenesis. Conservative sequence modifications include conservative amino acid substitutions, in which the amino acid residue is replaced with an amino acid residue having a similar side chain. Families of amino acid residues having similar side chains have been defined in the art. These families include amino acids with basic side chains (e.g., lysine, arginine, histidine), acidic side chains (e.g., aspartic acid, glutamic acid), uncharged polar side chains (e.g., glycine, asparagine, glutamine, serine, threonine, tyrosine, cysteine, tryptophan), nonpolar side chains (e.g., alanine, valine, leucine, isoleucine, proline, phenylalanine, methionine), beta-branched side chains (e.g., threonine, valine, isoleucine) and aromatic side chains (e.g., tyrosine, phenylalanine, tryptophan, histidine).

[0120] In one embodiment, amino acid sequence modifications to a heavy chain constant region or domain thereof do not modify or abrogate certain properties of the heavy chain constant region. These properties include, e.g., the rigidity or stiffness of the hinge, as well as agonist or antagonist activity of the antibody. In certain embodiments, amino acid sequence modifications to a heavy chain constant region or domain thereof do modify or abrogate certain properties of the heavy chain constant region.

[0121] Methods of identifying amino acid conservative substitutions that do and do not abrogate antibody and/or constant region properties are well-known in the art, e.g., as described herein in the Examples section.

[0122] For nucleic acids, the term “substantial homology” indicates that two nucleic acids, or designated sequences thereof, when optimally aligned and compared, are identical, with appropriate nucleotide insertions or deletions, in at least about 80% of the nucleotides, usually at least about 90% to 95%, and more preferably at least about 98% to 99.5% of the nucleotides. Alternatively, substantial homology exists when the segments will hybridize under selective hybridization conditions, to the complement of the strand.

[0123] For polypeptides, the term “substantial homology” indicates that two polypeptides, or designated sequences thereof, when optimally aligned and compared, are identical, with appropriate amino acid insertions or deletions, in at least about 80% of the amino acids, usually at least about 90% to 95%, and more preferably at least about 98% to 99.5% of the amino acids.

[0124] The percent identity between two sequences is a function of the number of identical positions shared by the sequences when the sequences are optimally aligned (i.e., % homology=# of identical positions/total # of positions×100), with optimal alignment determined taking into account the number of gaps, and the length of each gap, which need to be introduced for optimal alignment of the two sequences. The comparison of sequences and determination of percent identity between two sequences can be accomplished using a mathematical algorithm, as described in the non-limiting examples below.

[0125] The percent identity between two nucleotide sequences can be determined using the GAP program in the GCG software package (available at http://www.gcg.com), using a NWSgapdna.CMP matrix and a gap weight of 40, 50, 60, 70, or 80 and a length weight of 1, 2, 3, 4, 5, or 6. The percent identity between two nucleotide or amino acid sequences can also be determined using the algorithm of E. Meyers and W. Miller (CABIOS, 4:11-17 (1989)) which has been incorporated into the ALIGN program (version 2.0), using a PAM120 weight residue table, a gap length penalty of 12 and a gap penalty of 4. In addition, the percent identity between two amino acid sequences can be determined using the Needleman and Wunsch (J. Mol. Biol. (48):444-453 (1970)) algorithm which has been incorporated into the GAP program in the GCG software package (available at http://www.gcg.com), using either a Blossum 62 matrix or a PAM250 matrix, and a gap weight of 16, 14, 12, 10, 8, 6, or 4 and a length weight of 1, 2, 3, 4, 5, or 6.

[0126] The nucleic acid and protein sequences described herein can further be used as a “query sequence” to perform a search against public databases to, for example, identify related sequences. Such searches can be performed using the NBLAST and XBLAST programs (version 2.0) of Altschul, et al. (1990) J Mol. Biol. 215:403-10. BLAST nucleotide searches can be performed with the NBLAST program, score=100, wordlength=12 to obtain nucleotide sequences homologous to the nucleic acid molecules described herein. BLAST protein searches can be performed with the XBLAST program, score=50, wordlength=3 to obtain amino acid sequences homologous to the protein molecules described herein. To obtain gapped alignments for comparison purposes, Gapped BLAST can be utilized as described in Altschul et al., (1997) Nucleic Acids Res. 25(17):3389-3402. When utilizing BLAST and Gapped BLAST programs, the default parameters of the respective programs (e.g., XBLAST and NBLAST) can be used. See www.ncbi.nlm.nih.gov.

[0127] As used herein, the term “antigen” refers to any natural or synthetic immunogenic substance, such as a protein, peptide, or hapten. An antigen may be a full-length or mature protein, or a fragment thereof.

[0128] An “immune response” refers to a biological response within a vertebrate against foreign agents, which response protects the organism against these agents and diseases caused by them. An immune response is mediated by the action of a cell of the immune system (for example, a T lymphocyte, B lymphocyte, natural killer (NK) cell, macrophage, eosinophil, mast cell, dendritic cell or neutrophil) and soluble macromolecules produced by any of these cells or the liver (including antibodies, cytokines, and complement) that results in selective targeting, binding to, damage to, destruction of, and/or elimination from the vertebrate's body of invading pathogens, cells or tissues infected with pathogens, cancerous or other abnormal cells, or, in cases of autoimmunity or pathological inflammation, normal human cells or tissues. An immune reaction includes, e.g., activation or inhibition of a T cell, e.g., an effector T cell or a Th cell, such as a CD4+ or CD8+ T cell, or the inhibition of a Treg cell.

[0129] An “immunomodulator” or “immunoregulator” refers to an agent, e.g., a component of a signaling pathway, that may be involved in modulating, regulating, or modifying an immune response. “Modulating,” “regulating,” or “modifying” an immune response refers to any alteration in a cell of the immune system or in the activity of such cell (e.g., an effector T cell). Such modulation includes stimulation or suppression of the immune system which may be manifested by an increase or decrease in the number of various cell types, an increase or decrease in the activity of these cells, or any other changes which can occur within the immune system. Both inhibitory and stimulatory immunomodulators have been identified, some of which may have enhanced function in a tumor microenvironment. In preferred embodiments, the immunomodulator is located on the surface of a T cell. An “immunomodulatory target” or “immunoregulatory target” is an immunomodulator that is targeted for binding by, and whose activity is altered by the binding of, a substance, agent, moiety, compound or molecule. Immunomodulatory targets include, for example, receptors on the surface of a cell (“immunomodulatory receptors”) and receptor ligands (“immunomodulatory ligands”).

[0130] “Immunotherapy” refers to the treatment of a subject afflicted with, or at risk of contracting or suffering a recurrence of, a disease by a method comprising inducing, enhancing, suppressing or otherwise modifying an immune response.

[0131] “Immunostimulating therapy” or “immunostimulatory therapy” refers to a therapy that results in increasing (inducing or enhancing) an immune response in a subject for, e.g., treating cancer.

[0132] “Potentiating an endogenous immune response” means increasing the effectiveness or potency of an existing immune response in a subject. This increase in effectiveness and potency may be achieved, for example, by overcoming mechanisms that suppress the endogenous host immune response or by stimulating mechanisms that enhance the endogenous host immune response.

[0133] “T effector” (“T_{eff}”) cells refers to T cells (e.g., CD4+ and CD8+ T cells) with cytolytic activities as well as T helper (Th) cells, which secrete cytokines and activate and direct other immune cells, but does not include regulatory T cells (Treg cells).

[0134] As used herein, the term “linked” refers to the association of two or more molecules. The linkage can be covalent or non-covalent. The linkage also can be genetic (i.e., recombinantly fused). Such linkages can be achieved using a wide variety of art recognized techniques, such as chemical conjugation and recombinant protein production.

[0135] As used herein, “administering” refers to the physical introduction of a composition comprising a therapeutic agent to a subject, using any of the various methods and delivery systems known to those skilled in the art. Preferred routes of administration for antibodies described herein include intravenous, intraperitoneal, intramuscular, subcutaneous, spinal or other parenteral routes of administration, for example by injection or infusion. The phrase “parenteral administration” as used herein means modes of administration other than enteral and topical administration, usually by injection, and includes, without limitation, intravenous, intraperitoneal, intramuscular, intraarterial, intrathecal, intralymphatic, intralesional, intracapsular, intraorbital, intracardiac, intradermal, transtracheal, subcutaneous, subcuticular, intraarticular, subcapsular, subarachnoid, intraspinal, epidural and intrasternal injection and infusion, as well as in vivo electroporation. Alternatively, an antibody described herein can be administered via a non-parenteral route, such as a topical, epidermal or mucosal route of administration, for example, intranasally, orally, vaginally, rectally, sublingually or topically. Administering can also be performed, for example, once, a plurality of times, and/or over one or more extended periods.

[0136] As used herein, the term “T cell-mediated response” refers to a response mediated by T cells, including effector T cells (e.g., CD8⁺ cells) and helper T cells (e.g., CD4⁺ cells). T cell mediated responses include, for example, T cell cytotoxicity and proliferation.

[0137] As used herein, the term “cytotoxic T lymphocyte (CTL) response” refers to an immune response induced by cytotoxic T cells. CTL responses are mediated primarily by CD8⁺ T cells.

[0138] As used herein, the terms “inhibits” or “blocks” (e.g., referring to inhibition/blocking of a ligand to its receptor or to a subsequent intracellular response) are used interchangeably and encompass both partial and complete inhibition/blocking. In some embodiments, the antibody inhibits binding by at least about 50%, for example, at least about 60%, 70%, 80%, 90%, 95%, 99%, or 100%, determined, e.g., as further described herein.

[0139] As used herein, “cancer” refers a broad group of diseases characterized by the uncontrolled growth of abnormal cells in the body. Unregulated cell division may result in the formation of malignant tumors or cells that invade neighboring tissues and may metastasize to distant parts of the body through the lymphatic system or bloodstream.

[0140] The terms “treat,” “treating,” and “treatment,” as used herein, refer to any type of intervention or process performed on, or administering an active agent to, the subject with the objective of reversing, alleviating, ameliorating, inhibiting, or slowing down or preventing the progression, development, severity or recurrence of a symptom, complication, condition or biochemical indicia associated with a disease. Prophylaxis refers to administration to a subject who does not have a disease, to prevent the disease from occurring or minimize its effects if it does.

[0141] A “hematological malignancy” includes a lymphoma, leukemia, myeloma or a lymphoid malignancy, as well as a cancer of the spleen and the lymph nodes. Exemplary lymphomas include both B cell lymphomas and T cell lymphomas. B-cell lymphomas include both Hodgkin's lymphomas and most non-Hodgkin's lymphomas. Non-limiting examples of B cell lymphomas include diffuse large B-cell lymphoma, follicular lymphoma, mucosa-associated lymphatic tissue lymphoma, small cell lymphocytic lymphoma (overlaps with chronic lymphocytic leukemia), mantle cell lymphoma (MCL), Burkitt's lymphoma, mediastinal large B cell lymphoma, Waldenström macroglobulinemia, nodal marginal zone B cell lymphoma, splenic marginal zone lymphoma, intravascular large B-cell lymphoma, primary effusion lymphoma, lymphomatoid granulomatosis. Non-limiting examples of T cell lymphomas include extranodal T cell lymphoma, cutaneous T cell lymphomas, anaplastic large cell lymphoma, and angioimmunoblastic T cell lymphoma. Hematological malignancies also include leukemia, such as, but not limited to, secondary leukemia, chronic lymphocytic leukemia, acute myelogenous leukemia, chronic myelogenous leukemia, and acute lymphoblastic leukemia. Hematological malignancies further include myelomas, such as, but not limited to, multiple myeloma and smoldering multiple myeloma. Other hematological and/or B cell- or T-cell-associated cancers are encompassed by the term hematological malignancy.

[0142] The term “effective dose” or “effective dosage” is defined as an amount sufficient to achieve or at least partially achieve a desired effect. A “therapeutically effective amount” or “therapeutically effective dosage” of a drug or therapeutic agent is any amount of the drug that, when used alone or in combination with another therapeutic agent, promotes disease regression evidenced by a decrease in severity of disease symptoms, an increase in frequency and duration of disease symptom-free periods, or a prevention of impairment or disability due to the disease affliction. A “prophylactically effective amount” or a “prophylactically effective dosage” of a drug is an amount of the drug that, when administered alone or in combination with another therapeutic agent to a subject at risk of developing a disease or of suffering a recurrence of disease, inhibits the development or recurrence of the disease. The ability of a therapeutic or prophylactic agent to promote disease regression or inhibit the development or recurrence of the disease can be evaluated using a variety of methods known to the skilled practitioner, such as in human subjects during clinical trials, in animal model systems predictive of efficacy in humans, or by assaying the activity of the agent in in vitro assays.

[0143] By way of example, an anti-cancer agent is a drug that slows cancer progression or promotes cancer regression in a subject. In preferred embodiments, a therapeutically effective amount of a drug promotes cancer regression to the point of eliminating the cancer. “Promoting cancer regression” means that administering an effective amount of the drug, alone or in combination with an anti-neoplastic agent, results in a reduction in tumor growth or size, necrosis of the tumor, a decrease in severity of at least one disease symptom, an increase in frequency and duration of disease symptom-free periods, a prevention of impairment or disability due to the disease affliction, or otherwise amelioration of disease symptoms in the patient. Pharmacological effectiveness refers to the ability of the drug to promote cancer regression in the patient. Physiological safety refers to an acceptably low level of toxicity, or other adverse physiological effects at the cellular, organ and/or organism level (adverse effects) resulting from administration of the drug.

[0144] By way of example for the treatment of tumors, a therapeutically effective amount or dosage of the drug preferably inhibits cell growth or tumor growth by at least about 20%, more preferably by at least about 40%, even more preferably by at least about 60%, and still more preferably by at least about 80% relative to untreated subjects. In the most preferred embodiments, a therapeutically effective amount or dosage of the drug completely inhibits cell growth or tumor growth, i.e., preferably inhibits cell growth or tumor growth by 100%. The ability of a compound to inhibit tumor growth can be evaluated using the assays described infra. Alternatively, this property of a composition can be evaluated by examining the ability of the compound to inhibit cell growth, such inhibition can be measured in vitro by assays known to the skilled practitioner. In other preferred embodiments described herein, tumor regression may be observed and may continue for a period of at least about 20 days, more preferably at least about 40 days, or even more preferably at least about 60 days.

[0145] The terms “patient” and “subject” refer to any human or non-human animal that receives either prophylactic or therapeutic treatment. For example, the methods and compositions described herein can be used to treat a subject having cancer. The term “non-human animal” includes all vertebrates, e.g., mammals and non-mammals, such as non-human primates, sheep, dog, cow, chickens, amphibians, reptiles, etc.

[0146] Various aspects described herein are described in further detail in the following subsections.

### I. Modified Heavy Chain Constant Regions

[0147] Described herein are “modified heavy chain constant regions,” which, when present in antibodies, enhance or alter certain biological properties or features of the antibodies, relative to the same antibodies that do not have a modified heavy chain constant region, such as antibodies that contain a non-IgG2 hinge, e.g., IgG1 antibodies. Enhanced or altered biological properties of antibodies include:

[0148] (a) increased or altered internalization by a cell;

[0149] (b) increased or altered agonist activity;

[0150] (c) increased or altered antagonist or blocking activity;

[0151] (d) enhanced ADCC;

[0152] (d) generation of a new property;

[0153] (e) increased or altered signal transduction;

[0154] (f) formation of larger antibody/antigen cross-linked complexes;

[0155] (g) increased clustering or oligomerization of the target cell surface molecule;

[0156] (h) increased stimulation or enhancement of an immune response; and/or

[0157] (i) increased inhibition of an immune response.

[0158] Also provided herein are antibodies comprising heavy chains comprising one or more amino acid mutation that modulates effector function, e.g., reduces effector function. In certain embodiments, an antibody comprising a modified heavy chain constant region mediates antibody dependent receptor (or ligand or surface molecule) internalization more effectively, e.g., the antibody internalizes a target or surface molecule (e.g., a receptor or ligand) and/or is internalized itself with a higher rate and/or extent of internalization into a cell after the antibody binds to its target on the cell membrane, relative to the same antibody that does not comprise a modified heavy chain constant region, and comprises, e.g., an IgG1 heavy chain. The rate and extent of internalization of an antibody can be determined, e.g., as shown in the Examples. The rate of internalization, as measured, e.g., by T_{1/2} of internalization, e.g., as shown in the Examples, can be enhanced or increased by at least 10%, 30%, 50%, 75%, 2 fold, 3 fold, 5 fold or more, resulting in a reduction of the T_{1/2} by at least 10%, 30%, 50%, 75%, 2 fold, 3 fold, 5 fold or more. For example, instead of having a T_{1/2} of 10 minutes, a modified heavy chain constant region may increase the rate of internalization and thereby reduce the T_{1/2} to 5 minutes (i.e., a two fold increase in rate of internalization or a two-fold decrease in T_{1/2}). “T_{1/2}” is defined as the time at which half of the maximal internalization is achieved, as measured from the time the antibody is added to the cells. In certain embodiments, T_{1/2} is reduced by at least 10 minutes, 30 minutes, or 1 hour. The maximal level of internalization can be the level of internalization at the plateau of a graph representing the internalization plotted against antibody concentrations or time. A modified heavy chain constant region may increase the maximal level of internalization of an antibody by at least 10%, 30%, 50%, 75%, 2 fold, 3 fold, 5 fold or more. Another way of comparing internalization efficacies of different antibodies, such as an antibody with, and the same antibody without, a modified heavy chain constant region, is by comparing their level of internalization at a given antibody concentration (e.g., 100 nM) and/or at a given time (e.g., 2 minutes, 5 minutes, 10 minutes or 30 minutes). Comparing levels of internalization can also be done by comparing the EC50 levels of internalization. The level of internalization of one antibody can be defined relative to that of a given (reference) antibody, e.g., an antibody described herein, e.g., 11F11 or CD73.4-IgG2CS-IgG1, and, can be indicated as a percentage of the value obtained with the given (reference) antibody. The extent of internalization can be enhanced by at least 10%, 30%, 50%, 75%, 2 fold, 3 fold, 5 fold or more, as compared by any one of these methods.

[0159] In certain embodiments, an antibody comprising a modified heavy chain constant region has more potent agonist activity, relative to the same antibody that does not comprise a modified heavy chain constant region, and comprises, e.g., an IgG1 heavy chain. In certain embodiments, the enhanced agonist activity enhances the stimulatory activity of a target molecule, e.g., GITR, or other molecules that stimulate or co-stimulate an immune response, e.g., T cell activity. In certain embodiments, the enhanced agonist activity enhances the inhibitory activity of a target molecule that inhibits an immune response, e.g., T cell activity (e.g., a checkpoint inhibitor). The enhanced agonist activity of an antibody that modulates T cell activity can be determined, e.g., as shown in the Examples, e.g., by measuring the level of IFN-γ or IL-2 secretion from T cells that are contacted with the antibody. The agonist activity of an antibody that binds to a stimulatory target may be enhanced by at least 10%, 30%, 50%, 75%, 2 fold, 3 fold, 5 fold or more as defined by increased cytokine release or increased proliferation of effector T cells; reduced T regulatory cell activity if engagement on Tregs reduces Treg function; or increased depletion of Tregs. For example, the amount of IFN-γ or IL-2 secreted from T cells stimulated with an antibody that binds to a stimulatory target comprising a modified heavy chain constant region may be at least 10%, 30%, 50%, 75%, 2 fold, 3 fold, 5 fold or more higher than that of T cells simulated with the same antibody that does not comprise a modified heavy chain constant region. The agonist activity of an antibody that binds to an inhibitory target may be enhanced by at least 10%, 30%, 50%, 75%, 2 fold, 3 fold, 5 fold or more as defined by reduced cytokine release or reduced proliferation of effector T cells; increased T regulatory cell activity; or decreased depletion of Tregs. For example, the amount of IFN-γ or IL-2 secreted from T cells stimulated with an antibody that binds to an inhibitory target comprising a modified heavy chain constant region may be at least 10%, 30%, 50%, 75%, 2 fold, 3 fold, 5 fold or more lower than that of T cells simulated with the same antibody that does not comprise a modified heavy chain constant region.

[0160] In certain embodiments, an antibody comprising a modified heavy chain constant region has more potent antagonist or blocking activity, relative to the same antibody that does not comprise a modified heavy chain constant region, and comprises, e.g., an IgG1 heavy chain. The enhanced antagonist activity of an antibody can be determined, e.g., by measuring cytokine release and/or proliferation in contexts that include conditions of T cell activation. The antagonist activity may be enhanced by at least 10%, 30%, 50%, 75%, 2 fold, 3 fold, 5 fold or more.

[0161] In certain embodiments, an antibody comprising a modified heavy chain constant region has enhanced ADCC activity, relative to the same antibody that does not comprise a modified heavy chain constant region, and comprises, e.g., an IgG1 heavy chain. Enhanced ADCC may be determined according to methods known in the art. ADCC may be enhanced by at least 10%, 30%, 50%, 2 fold, 5 fold or more.

[0162] In certain embodiments, an antibody comprising a modified heavy chain constant region has the ability to form larger antibody/antigen cross-linked complexes, relative to the same antibody that does not comprise a modified heavy chain constant region, and comprises, e.g., an IgG1 heavy chain. The ability to form complexes can be determined as described, e.g., in the Examples. Antibody/antigen complexes formed with an antibody that comprises a modified heavy chain constant region may be at least 50%, 2 fold, 3 fold, 5 fold or 10 folder larger than complexes formed with the same antibody that does not comprise a modified heavy chain constant region. In certain embodiments, complexes of at least 2,000 kDa; 3,000 kDa; 5000 kDa; 10,000 kDa, 50,000 kDa or 100,000 kDa are formed with antibodies having a modified heavy chain constant region.

[0163] In certain embodiments, an antibody comprising a modified heavy chain constant region triggers more clustering or oligomerization of the target molecule on the cell surface, relative to the same antibody that does not comprise a modified heavy chain constant region, and comprises, e.g., an IgG1 heavy chain. The extent of clustering an oligomerization can be determined, e.g., by measuring the size of antibody/antigen complexes.

[0164] In certain embodiments, an antibody comprising a modified heavy chain constant region transduces a higher level or different type of signaling or signal transduction, relative to the same antibody that does not comprise a modified heavy chain constant region, and comprises, e.g., an IgG1 heavy chain. Signal transduction can be monitored by determining the level of activation of one or more proteins in signal transduction pathways. In certain embodiments, signal transduction is determined by measuring the activity (or phosphorylation) of a signal transduction protein, e.g., NFkB or p38, as described, e.g., in the Examples. Signal transduction triggered by an antibody that comprises a modified heavy chain constant region may be higher or lower by at least 10%, 20%, 50%, 2 fold, 5 fold or more than signal transduction with the same antibody that does not comprise a modified heavy chain constant region. For example, signal transduction triggered by an antibody that binds to a stimulatory molecule (e.g., GITR) and comprises a modified heavy chain constant region may be enhanced by at least 10% relative to that obtained with the same antibody having an IgG1 heavy chain. For example, EC50 of NFkB or p38 activity (e.g., phosphorylation) may be reduced by at least 50%, 2 fold, 5 fold or more.

[0165] In certain embodiments, an antibody comprising a modified heavy chain constant region has an increased ability to stimulate or enhance an immune response or the immune system, relative to the same antibody that does not comprise a modified heavy chain constant region, and comprises, e.g., an IgG1 heavy chain. An increased ability to stimulate an immune response or the immune system, can result from an enhanced agonist activity of T cell costimulatory receptors and/or an enhanced antagonist activity of inhibitory receptors. An increased ability to stimulate an immune response or the immune system may be reflected by a fold increase of the EC50 or maximal level of activity in an assay that measures an immune response, e.g., an assay that measures changes in cytokine or chemokine release, cytolytic activity (determined directly on target cells or indirectly via detecting CD107a or granzymes) and proliferation. The ability to stimulate an immune response or the immune system activity may be enhanced by at least 10%, 30%, 50%, 75%, 2 fold, 3 fold, 5 fold or more.

[0166] In certain embodiments, an antibody comprising a modified heavy chain constant region has an increased anti-proliferative or anti-tumor activity, relative to the same antibody that does not comprise a modified heavy chain constant region, and comprises, e.g., an IgG1 heavy chain. The enhanced anti-tumor activity of an antibody can be determined, e.g., by the growth of a tumor in an animal that has been treated with the antibody. The anti-tumor activity may be enhanced by at least 10%, 30%, 50%, 75%, 2 fold, 3 fold, 5 fold or more. Anti-tumor activity can be measured, e.g., as a decrease in tumor burden, e.g., manifested by decreased tumor growth kinetics and complete tumor regressions.

[0167] In certain embodiments, an antibody comprising a modified heavy chain constant region has an increased ability to inhibit or suppress an immune response or the immune system, relative to the same antibody that does not comprise a modified heavy chain constant region, and comprises, e.g., an IgG1 heavy chain. An increased ability to inhibit or suppress an immune response or the immune system, can result from an enhanced antagonist activity of T cell costimulatory receptors and/or an enhanced agonist activity of inhibitory receptors. An increased ability to stimulate an immune response or the immune system may be reflected by a fold increase of the EC50 or maximal level of activity in an assay that measures an immune response, e.g., an assay that measures changes in cytokine or chemokine release, cytolytic activity (determined directly on target cells or indirectly via detecting CD107a or granzymes) and proliferation. The ability to inhibit or suppress an immune response or the immune system activity may be enhanced by at least 10%, 30%, 50%, 75%, 2 fold, 3 fold, 5 fold or more.

[0168] In certain embodiments, a modified heavy chain constant region or portion thereof, e.g., the hinge, is more rigid, compared to other heavy chain constant regions, e.g., IgG1, IgG2, IgG3 and/or IgG4 heavy chain constant regions. For example, a modified heavy chain constant region is a non-naturally occurring heavy chain constant region that is more rigid than, or has a portion, e.g., the hinge, that is more rigid than a naturally-occurring heavy chain constant region or hinge thereof. The rigidity of a heavy chain constant region or portion thereof, such as the hinge, can be determined by e.g., by computer modeling, electron microscopy, spectroscopy such as Nuclear Magnetic Resonance (NMR), X-ray crystallography (B-factors), or Sedimentation Velocity Analytical ultracentrifugation (AUC) to measure or compare the radius of gyration of antibodies comprising the hinge. Alternatively, the rigidity of a heavy chain constant region or portion thereof can be determined by measuring the sizes of antibody/antigen complexes, e.g., as further described herein.

[0169] An antibody comprising a modified heavy chain constant region and exhibiting an enhanced functional property as determined according to methodologies known in the art and described herein, will be understood to relate to a statistically significant difference in the particular activity relative to that seen in the same antibody but with a different heavy chain constant region.

[0170] In certain embodiments, a modified heavy chain constant region comprises a hinge of the IgG2 isotype (an “IgG2 hinge”) and a CH1, CH2 and CH3 domain. In certain embodiments, a modified heavy chain constant region comprises an IgG2 hinge and a CH1, CH2 and CH3 domain, wherein at least one of the CH1, CH2 and CH3 domains is not of the IgG2 isotype. In certain embodiments, a modified heavy chain constant region comprises an IgG2 hinge and a CH1, CH2 and CH3 domain, wherein the heavy chain constant domain is not a wild-type IgG2 constant region or is not an IgG2 constant region with a mutation at amino acid 219 or 220. The IgG2 hinge may be a wildtype IgG2 hinge, e.g., a wildtype human IgG2 hinge (e.g., having SEQ ID NO: 8) or a variant thereof, provided that the IgG2 hinge retains the ability to confer to the antibody an enhanced activity relative to that of the same antibody that comprises a non-IgG2 hinge or comprises an IgG1 heavy chain. In certain embodiments, an IgG2 hinge variant retains similar rigidity or stiffness to that of a wildtype IgG2 hinge. The rigidity of a hinge can be determined, e.g., by computer modeling, electron microscopy, spectroscopy such as Nuclear Magnetic Resonance (NMR), X-ray crystallography (B-factors), or Sedimentation Velocity Analytical ultracentrifugation (AUC) to measure or compare the radius of gyration of antibodies comprising the hinge. A hinge has similar or higher rigidity relative to that of another hinge if an antibody comprising the hinge has a value obtained from one of the tests described in the previous sentence that differs from the value of the same antibody with a different hinge, e.g., an IgG1 hinge, in less than 5%, 10%, 25%, 50%, 75%, or 100%. A person of skill in the art would be able to determine from the tests whether a hinge has at least similar rigidity to that of another hinge by interpreting the results of these tests.

[0171] An exemplary human IgG2 hinge variant is an IgG2 hinge that comprises a substitution of one or more of the four cysteine residues (i.e., C219, C220, C226 and C229) with another amino acid. A cysteine may be replaced by a serine. An exemplary IgG2 hinge is a human IgG2 hinge comprising a C219X mutation or a C220X mutation, wherein X is any amino acid exept cysteine. In a certain embodiments, an IgG2 hinge does not comprise both a C219X and a C220X substitution. In certain embodiments, an IgG2 hinge comprises C219S or C220S, but not both C219S and C22S. Other IgG2 hinge variants that may be used include human IgG2 hinges comprising a C220, C226 and/or C229 substitution, e.g., a C220S, C226S or C229S mutation (which may be combined with a C219S mutation). An IgG2 hinge may also be an IgG2 hinge in which a portion of the hinge is that of another isotype (i.e., it is a chimeric or hybrid hinge), provided that the rigidity of the chimeric hinge is at least similar to that of a wildtype IgG2 hinge. For example, an IgG2 hinge may be an IgG2 hinge in which the lower hinge (as defined in Table 2) is of an IgG1 isotype, and is, e.g., a wildtype IgG1 lower hinge.

[0172] A “hybrid” or “chimeric” hinge is referred to as being of a specific isotype if more than half of the consecutive amino acids of the hinge are from that isotype. For example, a hinge having an upper and middle hinge of IgG2 and the lower hinge of IgG1 is considered to be an IgG2 hybrid hinge.

[0173] In certain embodiments, an antibody comprises a modified heavy chain constant region that comprises an IgG2 hinge comprising a sequence set forth in Table 4, e.g., one of the following amino acid sequences: 8, 21, 22, 23, 126-129, and 134-147. In certain embodiments, the hinge comprises SEQ ID NO: 8, 21, 126, 134 or 135, wherein 1, 2, 3 or all 4 amino acids P233, V234, A235 and G237 (corresponding to the C-terminal 4 amino acids “PVAG” (SEQ ID NO: 148) are deleted or substituted with another amino acid, e.g., the amino acids of the C-terminus of the IgG1 hinge (ELLG (SEQ ID NO: 149) or ELLGG (SEQ ID NO: 150). In certain embodiments, the hinge comprises SEQ ID NO: 8, 21, 126, 134 or 135, wherein V234, A235 and G237 are deleted or substituted with another amino acid. In certain embodiments, the hinge comprises SEQ ID NO: 8, 21, 126, 134 or 135, wherein A235 and G237 are deleted or substituted with another amino acid. In certain embodiments, the hinge comprises SEQ ID NO: 8, 21, 126, 134 or 135, wherein G237 is deleted or substituted with another amino acid. In certain embodiments, the hinge comprises SEQ ID NO: 8, 21, 126, 134 or 135, wherein V234 and A235 are deleted or substituted with another amino acid. Substitution of PVAG (SEQ ID NO: 143) in an IgG2 with the corresponding amino acids of an IgG1 hinge, i.e., (ELLG (SEQ ID NO: 144) or ELLGG (SEQ ID NO: 145)) to obtain a hybrid hinge having SEQ ID NO: 22 or 138 or variants thereof (see, e.g., Table 4) provides a hinge having the advantages of an IgG2 hinge and the effector function of IgG1 hinges.

[0174] In certain embodiments, a modified heavy chain constant region comprises a hinge that consists of or consists essentially of one of the sequences in Table 4, e.g., SEQ ID NOs: 8, 21, 22, 23, 127-132, and 134-141, and, in certain embodiments, does not comprise additional hinge amino acid residues.

TABLE 4
Exemplary IgG2 hinges

| IgG2 Hinge description | Amino acid sequence | SEQ ID NO: |
|---|---|---|
| Wildtype IgG2 | ERKCCVECPPCPAPPVAG | 8 |
| IgG2 with C219S | ERKSCVECPPCPAPPVAG | 21 |
| IgG2 with C220S | ERKCSVECPPCPAPPVAG | 126 |
| IgG2 with C219X | ERKXCVECPPCPAPPVAG | 134 |
| IgG2 with C220X | ERKCXVECPPCPAPPVAG | 135 |
| Wildtype IgG2 with C-terminal X | ERKCCVECPPCPAPPVAGX | 143 |
| IgG2 with C219Swith C-terminal X | ERKSCVECPPCPAPPVAGX | 144 |
| IgG2 with C220Swith C-terminal X | ERKCSVECPPCPAPPVAGX | 145 |
| IgG2 with C219X with C-terminal X | ERKXCVECPPCPAPPVAGX | 146 |
| IgG2 with C220X with C-terminal X | ERKCXVECPPCPAPPVAGX | 147 |
| IgG2/IgG1 hybrid | ERKCCVECPPCPAPELLGG | 22 |
| IgG2/IgG1 hybrid with C219S | ERKSCVECPPCPAPELLGG | 23 |
| IgG2/IgG1 hybrid with C220S | ERKCSVECPPCPAPELLGG | 127 |
| IgG2/IgG1 hybrid with C219X | ERKXCVECPPCPAPELLGG | 136 |
| IgG2/IgG1 hybrid with C220X | ERKCXVECPPCPAPELLGG | 137 |
| IgG2/IgG1 hybrid deltaG | ERKCCVECPPCPAPELLG | 138 |
| IgG2/IgG1 hybrid with C219S deltaG | ERKSCVECPPCPAPELLG | 139 |
| IgG2/IgG1 hybrid with C220S deltaG | ERKCSVECPPCPAPELLG | 140 |
| IgG2/IgG1 hybrid with C219X deltaG | ERKXCVECPPCPAPELLG | 141 |
| IgG2/IgG1 hybrid with C220X deltaG | ERKCXVECPPCPAPELLG | 142 |
| Truncated wiltype IgG2 | ERKCCVECPPCPAP | 128 |
| Truncated wiltype IgG2 with C219S | ERKSCVECPPCPAP | 131 |
| Truncated wiltype IgG2 with C220S | ERKCSVECPPCPAP | 132 |
| Truncated wiltype IgG2 with C219X | ERKXCVECPPCPAP | 129 |
| Truncated wiltype IgG2 with C220X | ERKCXVECPPCPAP | 130 |

X is any amino acid, except cysteine.

[0175] In certain embodiments, a modified heav chain constant region comprises an IgG2 hinge set forth in Table 4, in which 1-5, 1-3, 1-2 or 1 amino acid is inserted between amino acid residues CVE and CPP. In certain embodiments, THT or GGG is inserted. In certain embodiments, 1, 1-2 or 1-3 amino acids may be inserted between the hinge and CH2 domain. For example, an additional glycine may be inserted between the hinge and the CH2 domain.

[0176] In certain embodiments a modified heavy chain constant region is an IgG1 or IgG2 constant region, wherein the hinge comprises a deletion of 1-10 amino acids. As shown in the Examples, an IgG1 antibody lacking amino acid residues SCDKTHT (S219, C220, D221, K222, T223, H224 and T225; SEQ ID NO: 151) conferred antibody mediated CD73 internalization more effectively than the same antibody having a wildtype IgG1 constant region. Similarly, in the context of an IgG2 antibody, an IgG2 antibody lacking amino acid residues CCVE (C219, C220, V222, and E224; SEQ ID NO: 152) conferred antibody mediated CD73 internalization more effectively than the same antibody having a wildtype IgG1 constant region. Accordingly, provided herein are modified heavy chain constant region in which the hinge comprises a deletion of 1, 2, 3, 4, 5, 6, or 7 amino acid residues, selected from residues S219, C220, D221, K222, T223, H224 and T225 for an IgG1 antibody, and residues C219, C220, V222, and E224 for an IgG2 antibody.

[0177] In certain embodiments, a modified heavy chain constant region comprises a CH1 domain that is a wildtype CH1 domain of the IgG1 or IgG2 isotype (“IgG1 CH1 domain” or “IgG2 CH1 domain,” respectively). CH1 domains of the isotypes IgG3 and IgG4 (“IgG3 CH1 domain and “IgG2 CH1 domain,” respectively) may also be used. A CH1 domain may also be a variant of a wildtype CH1 domain, e.g., a variant of a wildtype IgG1, IgG2, IgG3 or IgG4 CH1 domain. Exemplary variants of CH1 domains include A114C, C131S and/or T173C. A CH1 domain, e.g., an IgG2 CH1 domain, may comprise the substitution C131S, which substitution confers onto an IgG2 antibody or antibody having an IgG2 CH1 and hinge the B form (or conformation).

[0178] In certain embodiments, a modified heavy chain constant region comprises a CH1 domain that is of the IgG2 isotype. In certain embodiments, the CH1 domain is wildtype IgG2 CH1 domain, e.g., having the amino acid sequence: ASTKGPSVFPLAPCSRSTSESTAALGCLVKDYFPEPVTVSWNSGALTSGVHTFPAVL QSSGLYSLSSVVTVPSSNFGTQTYTCNVDHKPSNTKVDKTV (SEQ ID NO: 7). In certain embodiments, the CH1 domain is a variant of SEQ ID NO: 7 and comprises 1-10, 1-5, 1-2 or 1 amino acid substitutions or deletions relative to SEQ ID NO: 7. As further described in the Examples, it has been shown herein that an IgG2 CH1 domain or variants thereof confer enhanced properties to antibodies relative to IgG1 antibodies and even more enhanced properties when the antibodies also comprise an IgG2 hinge. In certain embodiments, IgG2 CH1 variants do not comprise an amino acid substitution or deletion at one or more of the following amino acid residues: C131, R133, E137 and S138, which amino acid residues are shown in bold and underlined in SEQ ID NO: 7 shown above. For example, a modified heavy chain constant region may comprise an IgG2 CH1 domain in which neither of R133, E137 and S138 are substituted with another amino acid or are deleted or in which neither of C131, R133, E137 and S138 are substituted with another amino acid or are deleted. In certain embodiments, C131 is substituted with another amino acid, e.g., C131S, which substitution triggers the antibody to adopt conformation B. Both conformation A and conformation B antibodies having modified heavy chain constant regions have been shown herein to have enhanced activities relative to the same antibody with an IgG1 constant region.

[0179] In certain embodiments, N192 and/or F193 (shown as italicized and underlined residues in SEQ ID NO: 7 shown above) are substituted with another amino acid, e.g., with the corresponding amino acids in IgG1, i.e., N192S and/or F193L.

[0180] In certain embodiments, one or more amino acid residues of an IgG2 CH1 domain are substituted with the corresponding amino acid residues in IgG4. For example, N192 may be N192S; F193 may be F193L; C131 may be C131K; and/or T214 may be T214R.

[0181] An antibody may comprise a modified heavy chain constant region comprising an IgG2 CH1 domain or variant thereof and IgG2 hinge or variant thereof. The hinge and CH1 domain may be a combination of any IgG2 hinge and IgG2 CH1 domain described herein. In certain embodiments, the IgG2 CH1 and hinge comprise the following amino acid sequence

(SEQ ID NO: 133)
ASTKGPSVFPLAPCSRSTSESTAALGCLVKDYFPEPVTVSWNSGALTSGV

[chemical structure]

[chemical structure]

or an amino acid sequence that differs therefrom in at most 1-10 amino acids. The amino acid variants are as described for the hinge and CH1 domains above.

[0182] In certain embodiments, antibodies comprise at least an IgG2 hinge, and optionally also an IgG2 CH1 domain or fragment or derivative of the hinge and/or CH1 domain and the antibody has adopted form (of conformation) A (see, e.g., Allen et al. (2009) Biochemistry 48:3755). In certain embodiments, antibodies comprise at least an IgG2 hinge, and optionally also an IgG2 CH1 domain or fragment or derivative of the hinge and/or CH1 domain and the antibody has adopted form B (see, e.g., Allen et al. (2009) Biochemistry 48:3755).

[0183] In certain embodiments, a modified heavy chain constant region comprises a CH2 domain that is a wildtype CH2 domain of the IgG1, IgG2, IgG3 or IgG4 isotype (“IgG1 CH2 domain,” “IgG2 CH2 domain,” “IgG3 CH2 domain,” or “IgG4 CH2 domain,” respectively. A CH2 domain may also be a variant of a wildtype CH2 domain, e.g., a variant of a wildtype IgG1, IgG2, IgG3 or IgG4 CH2 domain. Exemplary variants of CH2 domains include variants that modulate a biological activity of the Fc region of an antibody, such as ADCC or CDC or modulate the half-life of the antibody or its stability. In one embodiment, the CH2 domain is a human IgG1 CH2 domain with an A330S and/or P331S mutation, wherein the CH2 domain has reduced effector function relative to the same CH2 mutation without the mutations. A CH2 domain may have enhanced effector function. CH2 domains may comprise one or more of the following mutations: SE (S267E), SELF (S267E/L328F), SDIE (S239D/I332E), SEFF, GASDALIE (G236A/S239D/A330L/I332E), and/or one or more mutations at the following amino acids: E233, L235, G237, P238, H268, P271, L328, A330 and K322. Note that some of these mutations are actually part of the hinge, rather than the CH2 domain as defined herein. Other mutations are further set forth herein elsewhere.

[0184] In certain embodiments, a modified heavy chain constant region comprises a CH3 domain that is a wildtype CH3 domain of the IgG1, IgG2, IgG3 or IgG4 isotype (“IgG1 CH3 domain,” “IgG2 CH3 domain,” “IgG3 CH3 domain,” or “IgG4 CH3 domain,” respectively. A CH3 domain may also be a variant of a wildtype CH3 domain, e.g., a variant of a wildtype IgG1, IgG2, IgG3 or IgG4 CH3 domain. Exemplary variants of CH3 domains include variants that modulate a biological activity of the Fc region of an antibody, such as ADCC or CDC or modulate the half-life of the antibody or its stability.

[0185] Generally, variants of the CH1, hinge, CH2 or CH3 domains may comprise 1, 2, 3, 4, 5, 6, 7, 8, 9, 10 or more mutations, and/or at most 10, 9, 8, 7, 6, 5, 4, 3, 2 or 1 mutation, or 1-10 or 1-5 mutations, or comprise an amino acid sequence that is at least about 75%, 80%, 85%, 90%, 95%, 96%, 97%, 98%, or 99% identical to that of the corresponding wildtype domain (CH1, hinge, CH2, or CH3 domain, respectively), provided that the heavy chain constant region comprising the specific variant retains the necessary biological activity.

[0186] Table 5 sets forth exemplary human heavy chain constant regions comprising a human CH1, hinge, CH2 and/or CH3 domains, wherein each domain is either a wildtype domain or a variant thereof that provides the desired biological activity to the heavy chain constant region. An unfilled cell in Table 5 indicates that the domain is present or not, and if present can be of any isotype, e.g., IgG1, IgG2, IgG3 or IgG4. For example, an antibody comprising the heavy chain constant region 1 in Table 5 is an antibody that comprises a heavy chain constant region comprising at least an IgG2 hinge, and which may also comprise a CH1, CH2 and/or CH3 domain, and if present, which CH1, CH2 and/or CH3 domain is of an IgG1, IgG2, IgG3 or IgG4 isotype. As another example for understanding Table 5, an antibody comprising a heavy chain constant region 8 is an antibody comprising a heavy chain constant region comprising an IgG1 CH1 domain, and IgG2 hinge, an IgG1 CH2 domain, and which may or may not also comprise an CH3 domain, which is present, may be of an IgG1, IgG2, IgG3 or IgG4 isotype.

TABLE 5

| MHCCR* | CH1 | Hinge | CH2 | CH3 |
|---|---|---|---|---|
| 1 | | IgG2 | | |
| 2 | IgG1 | IgG2 | | |
| 3 | IgG2 | IgG2 | | |
| 4 | | IgG2 | IgG1 | |
| 5 | | IgG2 | IgG2 | |
| 6 | | IgG2 | | IgG1 |
| 7 | | IgG2 | | IgG2 |
| 8 | IgG1 | IgG2 | IgG1 | |
| 9 | IgG1 | IgG2 | IgG2 | |
| 10 | IgG2 | IgG2 | IgG1 | |
| 11 | IgG2 | IgG2 | IgG2 | |
| 12 | IgG1 | IgG2 | | IgG1 |
| 13 | IgG1 | IgG2 | | IgG2 |
| 14 | IgG2 | IgG2 | | IgG1 |
| 15 | IgG2 | IgG2 | | IgG2 |
| 16 | | IgG2 | IgG1 | IgG1 |
| 17 | | IgG2 | IgG1 | IgG2 |
| 18 | | IgG2 | IgG2 | IgG1 |
| 19 | | IgG2 | IgG2 | IgG2 |
| 20 | IgG1 | IgG2 | IgG1 | IgG1 |
| 21 | IgG1 | IgG2 | IgG1 | IgG2 |
| 22 | IgG1 | IgG2 | IgG2 | IgG1 |
| 23 | IgG1 | IgG2 | IgG2 | IgG2 |
| 24 | IgG2 | IgG2 | IgG1 | IgG1 |
| 25 | IgG2 | IgG2 | IgG1 | IgG2 |
| 26 | IgG2 | IgG2 | IgG2 | IgG1 |
| 27 | IgG2 | IgG2 | IgG2 | IgG2 |

*Modified heavy chain constant region

[0187] In certain embodiments, an antibody comprising a heavy chain constant region shown in Table 5 has an enhanced biological activity relative to the same antibody comprising a heavy chain constant region that does not comprise that specific heavy chain constant region or relative to the same antibody that comprises an IgG1 constant region.

[0188] In certain embodiments, a method for improving the biological activity of an antibody that comprises a non-IgG2 hinge and/or non-IgG2 CH1 domain comprises providing an antibody that comprises a non-IgG2 hinge and/or a non-IgG2 CH1 domain, and replacing the non-IgG2 hinge and the non-IgG2 CH1 domain with an IgG2 hinge and an IgG2 CH1 domain, respectively. A method for improving the biological activity of an antibody that does not comprise a modified heavy chain constant region, may comprise providing an antibody that does not comprise a modified heavy chain constant region, and replacing its heavy chain constant region with a modified heavy chain constant region.

[0189] Exemplary modified heavy chain constant regions are provided in Table 6, which sets forth the identity of each of the domains.

TABLE 6

| | | | | | SEQ ID NO |
|---|---|---|---|---|---|
| Modified heavy | | | | | of whole |
| chain constant region | CH1 | Hinge | CH2 | CH3 | MHCCR |
| IgG1-IgG2-IgG1 | IgG1 wildtype | IgG2/IgG1 | IgG1 wildtype | IgG1 wildtype | SEQ ID NO: 26 |
| | SEQ ID NO: 2 | SEQ ID NO: 22 | SEQ ID NO: 4 | SEQ ID NO: 5 | |
| IgG1-IgG2-IgG12 | IgG1 wildtype | IgG2 wildtype | IgG1 wildtype | IgG1 wildtype | SEQ ID NO: 27 |
| | SEQ ID NO: 2 | SEQ ID NO: 8 | SEQ ID NO: 4 | SEQ ID NO: 5 | |
| IgG1-IgG2C2-IgG1 | IgG1 wildtype | IgG2C219S/IgG1 | IgG1 wildtype | IgG1 wildtype | SEQ ID NO: 32 |
| | SEQ ID NO: 2 | SEQ ID NO: 23 | SEQ ID NO: 4 | SEQ ID NO: 5 | |
| IgG1-IgG2CS-IgG12 | IgG1 wildtype | IgG2 C219S | IgG1 wildtype | IgG1 wildtype | SEQ ID NO: 33 |
| | SEQ ID NO: 2 | SEQ ID NO: 21 | SEQ ID NO: 4 | SEQ ID NO: 5 | |
| IgG2-IgG1 | IgG2 wildtype | IgG2/IgG1 | IgG1 wildtype | IgG1 wildtype | SEQ ID NO: 28 |
| | SEQ ID NO: 7 | SEQ ID NO: 22 | SEQ ID NO: 4 | SEQ ID NO: 5 | |
| IgG2-IgG12 | IgG2 wildtype | IgG2 wildtype | IgG1 wildtype | IgG1 wildtype | SEQ ID NO: 29 |
| | SEQ ID NO: 7 | SEQ ID NO: 8 | SEQ ID NO: 4 | SEQ ID NO: 5 | |
| IgG2CS-IgG1 | IgG2 wildtype | IgG2C219S/IgG1 | IgG1 wildtype | IgG1 wildtype | SEQ ID NO: 34 |
| | SEQ ID NO: 7 | SEQ ID NO: 23 | SEQ ID NO: 4 | SEQ ID NO: 5 | |
| IgG2CS-IgG12 | IgG2 wildtype | IgG2 C219S | IgG1 wildtype | IgG1 wildtype | SEQ ID NO: 35 |
| | SEQ ID NO: 7 | SEQ ID NO: 21 | SEQ ID NO: 4 | SEQ ID NO: 5 | |
| IgG1CH1- | IgG1 wildtype | IgG2 wildtype | IgG1 | IgG1 wildtype | SEQ ID NO: 30 |
| IgG2Hinge- | SEQ ID NO: 2 | SEQ ID NO: 8 | A330S/P331S | SEQ ID NO: 5 | |
| IgG1CH2 (A330S, | | | SEQ ID NO: 24 | | |
| P331S)-IgG1CH3 | | | | | |
| or | | | | | |
| IgG1-IgG2-IgG1.1 | | | | | |
| IgG1CH1- | IgG1 wildtype | IgG2 C219S | IgG1 | IgG1 wildtype | SEQ ID NO: 36 |
| IgG2Hinge(C219S)- | SEQ ID NO: 2 | SEQ ID NO: 21 | A330S/P331S | SEQ ID NO: 5 | |
| IgG1CH2(A330S, | | | SEQ ID NO: 24 | | |
| P331S)-IgG1CH3 | | | | | |
| or | | | | | |
| IgG1-IgG2CS- | | | | | |
| IgG1.1 | | | | | |
| IgG2-IgG1.1 | IgG2 wildtype | IgG2 wildtype | IgG1 | IgG1 wildtype | SEQ ID NO: 31 |
| | SEQ ID NO: 7 | SEQ ID NO: 8 | A330S/P331S | SEQ ID NO: 5 | |
| | | | SEQ ID NO: 24 | | |
| IgG2CS-IgG1.1 | IgG2 wildtype | IgG2 wildtype | IgG1 | IgG1 wildtype | SEQ ID NO: 37 |
| | SEQ ID NO: 7 | SEQ ID NO: 21 | A330S/P331S | SEQ ID NO: 5 | |
| | | | SEQ ID NO: 24 | | |

[0190] In certain embodiments, an antibody comprises a modified heavy chain constant region comprising an IgG2 hinge comprising any one of SEQ ID NO: 8, 21, 22, 23, 126-132, 134-136 and 137 or a variant thereof, such as an IgG2 hinge comprising an amino acid sequence that (i) differs from any one of SEQ ID NO: 8, 21, 22, 23, 126-132, 134-136 and 137 in 1, 2, 3, 4 or 5 amino acids substitutions, additions or deletions; (ii) differs from any one of SEQ ID NO: 8, 21, 22, 23, 126-132, 134-136 and 137 in at most 5, 4, 3, 2, or 1 amino acids substitutions, additions or deletions; (iii) differs from any one of SEQ ID NO: 8, 21, 22, 23, 126-132, 134-136 and 137 in 1-5, 1-3, 1-2, 2-5 or 3-5 amino acids substitutions, additions or deletions and/or (iv) comprises an amino acid sequence that is at least about 75%, 80%, 85%, 90%, 95%, 96%, 97%, 98% or 99% identical to any one of SEQ ID NO: 8, 21, 22, 23, 126-132, 134-136 or 137, wherein in any of (i)-(iv), an amino acid substitution may be a conservative amino acid substitution or a non-conservative amino acid substitution; and wherein the modified heavy chain constant region has an enhanced biological activity relative to that of another heavy chain constant region, e.g., a heavy chain constant region that comprises a non-IgG2 hinge or relative to the same modified heavy chain constant region that comprises a non-IgG2 hinge.

[0191] In certain embodiments, a hinge comprises a sequence that is a variant of any one of SEQ ID NO: 8, 21, 22, 23, 126-132, 134-136 and 137, wherein 8217 (second amino acid in wildtype IgG2 hinge (SEQ ID NO: 8) is not deleted or substituted with another amino acid. In certain embodiments in which a hinge is a variant of any one of SEQ ID NO: 8, 21, 22, 23, 126-132, 134-136 and 137, the hinge has a stiffness that is similar to that of wildtype IgG2.

[0192] In certain embodiments, an antibody comprises a modified heavy chain constant region comprising an IgG1 CH1 domain comprising SEQ ID NO: 2 or an IgG2 CH1 domain comprising SEQ ID NO: 7, or a variant of SEQ ID NO: 2 or 7, which variant (i) differs from SEQ ID NO: 2 or 7 in 1, 2, 3, 4 or 5 amino acids substitutions, additions or deletions; (ii) differs from SEQ ID NO: 2 or 7 in at most 5, 4, 3, 2, or 1 amino acids substitutions, additions or deletions; (iii) differs from SEQ ID NO: 2 or 7 in 1-5, 1-3, 1-2, 2-5 or 3-5 amino acids substitutions, additions or deletions and/or (iv) comprises an amino acid sequence that is at least about 75%, 80%, 85%, 90%, 95%, 96%, 97%, 98% or 99% identical to SEQ ID NO: 2 or 7, wherein in any of (i)-(iv), an amino acid substitution may be a conservative amino acid substitution or a non-conservative amino acid substitution; and wherein the modified heavy chain constant region has an enhanced biological activity relative to that of another heavy chain constant region, e.g., a heavy chain constant region that comprises a non-IgG2 hinge or relative to the same modified heavy chain constant region that comprises a non-IgG2 hinge.

[0193] In certain embodiments, an antibody comprises a modified heavy chain constant region comprising an IgG1 CH2 domain comprising SEQ ID NO: 4 or 24, or a variant of SEQ ID NO: 4 or 24, which variant (i) differs from SEQ ID NO: 4 or 24 in 1, 2, 3, 4 or 5 amino acids substitutions, additions or deletions; (ii) differs from SEQ ID NO: 4 or 24 in at most 5, 4, 3, 2, or 1 amino acids substitutions, additions or deletions; (iii) differs from SEQ ID NO: 4 or 24 in 1-5, 1-3, 1-2, 2-5 or 3-5 amino acids substitutions, additions or deletions and/or (iv) comprises an amino acid sequence that is at least about 75%, 80%, 85%, 90%, 95%, 96%, 97%, 98% or 99% identical to SEQ ID NO: 4 or 24, wherein in any of (i)-(iv), an amino acid substitution may be a conservative amino acid substitution or a non-conservative amino acid substitution; and wherein the modified heavy chain constant region has an enhanced biological activity relative to that of another heavy chain constant region, e.g., a heavy chain constant region that comprises a non-IgG2 hinge or relative to the same modified heavy chain constant region that comprises a non-IgG2 hinge.

[0194] In certain embodiments, an antibody comprises a modified heavy chain constant region comprising an IgG1 CH3 domain comprising SEQ ID NO: 5, or a variant of SEQ ID NO: 5, which variant (i) differs from SEQ ID NO: 5 in 1, 2, 3, 4 or 5 amino acids substitutions, additions or deletions; (ii) differs from SEQ ID NO: 5 in at most 5, 4, 3, 2, or 1 amino acids substitutions, additions or deletions; (iii) differs from SEQ ID NO: 5 in 1-5, 1-3, 1-2, 2-5 or 3-5 amino acids substitutions, additions or deletions and/or (iv) comprises an amino acid sequence that is at least about 75%, 80%, 85%, 90%, 95%, 96%, 97%, 98% or 99% identical to SEQ ID NO: 5, wherein in any of (i)-(iv), an amino acid substitution may be a conservative amino acid substitution or a non-conservative amino acid substitution; and wherein the modified heavy chain constant region has an enhanced biological activity relative to that of another heavy chain constant region, e.g., a heavy chain constant region that comprises a non-IgG2 hinge or relative to the same modified heavy chain constant region that comprises a non-IgG2 hinge.

[0195] Modified heavy chain constant regions may also comprise a combination of the CH1, hinge, CH2 and CH3 domains described above.

[0196] In certain embodiments, an antibody comprises a modified heavy chain constant region described herein or a variant of a modified heavy chain constant region described herein, which variant (i) differs from a modified heavy chain constant region described herein in 1, 2, 3, 4, 5, 6, 7, 8, 9, 10 or more amino acids substitutions, additions or deletions; (ii) differs from a modified heavy chain constant region described herein in at most 10, 9, 8, 7, 6, 5, 4, 3, 2, or 1 amino acids substitutions, additions or deletions; (iii) differs from a modified heavy chain constant region described herein in 1-5, 1-3, 1-2, 2-5, 3-5, 1-10, or 5-10 amino acids substitutions, additions or deletions and/or (iv) comprises an amino acid sequence that is at least about 75%, 80%, 85%, 90%, 95%, 96%, 97%, 98% or 99% identical to a modified heavy chain constant region described herein, wherein in any of (i)-(iv), an amino acid substitution may be a conservative amino acid substitution or a non-conservative amino acid substitution; and wherein the modified heavy chain constant region has an enhanced biological activity relative to that of another heavy chain constant region, e.g., a heavy chain constant region that comprises a non-IgG2 hinge or relative to the same modified heavy chain constant region that comprises a non-IgG2 hinge.

[0197] In certain embodiments, an antibody comprises a modified heavy chain constant region comprising any one of SEQ ID NO: 26-37, 54-56, 78-125, 152-232, 234-245 and 247-262, or a variant of any one of SEQ ID NO: 26-37, 54-56, 78-125, 152-232, 234-245 and 247-262, which variant (i) differs from any one of SEQ ID NO: 26-37, 54-56, 78-125, 152-232, 234-245 and 247-262 in 1, 2, 3, 4, 5, 6, 7, 8, 9, 10 or more amino acids substitutions, additions or deletions; (ii) differs from any one of SEQ ID NO: 26-37, 54-56, 78-125, 152-232, 234-245 and 247-262 in at most 10, 9, 8, 7, 6, 5, 4, 3, 2, or 1 amino acids substitutions, additions or deletions; (iii) differs from any one of SEQ ID NO: 26-37, 54-56, 78-125, 152-232, 234-245 and 247-262 in 1-5, 1-3, 1-2, 2-5, 3-5, 1-10, or 5-10 amino acids substitutions, additions or deletions and/or (iv) comprises an amino acid sequence that is at least about 75%, 80%, 85%, 90%, 95%, 96%, 97%, 98% or 99% identical to any one of SEQ ID NO: 26-37, 54-56, 78-125, 152-232, 234-245 and 247-262, wherein in any of (i)-(iv), an amino acid substitution may be a conservative amino acid substitution or a non-conservative amino acid substitution; and wherein the modified heavy chain constant region has an enhanced biological activity (and/or reduced effector function) relative to that of another heavy chain constant region, e.g., a heavy chain constant region that comprises a non-IgG2 hinge or relative to the same modified heavy chain constant region that comprises a non-IgG2 hinge.

[0198] Modified heavy chain constant regions may have (i) similar, reduced or increased effector function (e.g., binding to an FcγR) relative to a wildtype heavy chain constant region and or (ii) similar, reduced or increased half-life (or binding to the FcRn receptor) relative to a wildtype heavy chain constant region.

[0199] In certain embodiments, an antibody (or antigen binding fragment thereof) comprises a modified heavy chain constant region comprising SEQ ID NO: 198 or a portion thereof comprising P238K, or a variant of any one of SEQ ID NO: 198 or portion thereof, which variant (i) differs from SEQ ID NO: 198 or a portion thereof comprising P238K in 1, 2, 3, 4, 5, 6, 7, 8, 9, 10 or more amino acids substitutions, additions or deletions; (ii) differs from SEQ ID NO: 198 or a portion thereof comprising P238K in at most 10, 9, 8, 7, 6, 5, 4, 3, 2, or 1 amino acids substitutions, additions or deletions; (iii) differs from SEQ ID NO: 198 or a portion thereof comprising P238K in 1-5, 1-3, 1-2, 2-5, 3-5, 1-10, or 5-10 amino acids substitutions, additions or deletions and/or (iv) comprises an amino acid sequence that is at least about 75%, 80%, 85%, 90%, 95%, 96%, 97%, 98% or 99% identical to SEQ ID NO: 198 or a portion thereof comprising P238K, wherein an amino acid substitution may be a conservative amino acid substitution or a non-conservative amino acid substitution; and wherein the modified heavy chain constant region has reduced effector function, e.g., undetectable binding to the low affinity Fc√Rs (e.g., CD32a, CD32b and CD16a) and optionally undetectable binding to the high affinity Fc√R (CD64), such as determined in an assay described herein.

[0200] In certain embodiments, an IgG1 Fc comprising a P238K mutation (e.g., comprising SEQ ID NO: 198 or a portion thereof), comprises no other mutations relative to a wild type IgG1 Fc, e.g., those described herein. In certain embodiments, an IgG1 Fc comprising a P238K mutation (e.g., comprising SEQ ID NO: 198 or a portion thereof), comprises 1-5 amino acid changes in addition to P238K relative to the wild type human IgG1 Fc, e.g., it comprises SEQ ID NO: 198 or a portion thereof and 1-5 amino acid changes relative to SEQ ID NO: 198 or the portion thereof, provided that the IgG1 Fc has reduced effector function.

[0201] In certain embodiments, an IgG1 Fc comprising a P238K mutation does not comprise any other mutation that reduces effector function. In certain embodiments, an IgG1 Fc comprising a P238K mutation comprises 1-5 mutations that reduces effector function.

[0202] In certain embodiments, an IgG Fc comprising a P238K mutation also comprises an L235E mutation and/or a K322A mutation, and may, in certain embodiments not contain any additional Fc mutation that modulates Fc effector function, e.g., it does not include a mutation at P330, P331, or a mutation in the lower hinge, e.g., at amino acids 234 and 236-237. The IgG may be an IgG1 or IgG2.

[0203] In certain embodiments, an antibody comprises a heavy chain constant region comprising an IgG2 constant domain, or at least the hinge thereof, wherein the IgG2 constant domain or hinge thereof comprises a mutation selected from the group consisting of P238A, P238K, L235A, K322A, and optionally a mutation at C219 and/or C220, e.g., C219S and/or C220S.

[0204] In certain embodiments, an antibody comprises a heavy chain constant region comprising an IgG1 constant domain comprising one or more of L234A, L235E and G237A. As used herein “IgG1.3” refers to an IgG1 heavy chain comprising L234A, L235E and G237A (see, e.g., SEQ ID NO: 248). IgG1 constant regions comprising these three mutations may also comprise additional mutations, such as those described herein. Exemplary sequences comprising L234A, L235E and G237A mutations and additional mutations are provided herein in the Sequence Table. An IgG1.3 Fc provides an antibody with significantly reduced effector function, such as ADCC and CDC. In certain embodiments, an Fc comprises the mutations of IgG1.3 and additional mutations, e.g., P238K.

[0205] In certain embodiments, an antibody comprises an IgG1.3 heavy chain constant region, which constant region does not comprise any other than mutation that modulates effector function, in addition to L234A, L235E and G237A. In certain embodiments, an antibody comprises an IgG1.3 heavy chain constant region, which constant region does not comprise any other than mutation, in addition to L234A, L235E and G237A.

[0206] Heavy chain constant regions are provided in the Sequence Table. In certain embodiments, an antibody comprises one of the heavy chain constant regions set forth in the Table, wherein the constant region does not comprise any mutation in addition to that in the sequence set forth in the Table. In certain embodiments, an antibody comprises one of the heavy chain constant regions set forth in the Table, wherein the constant region (i) differs from a sequence in the Sequence Table in 1, 2, 3, 4 or 5 amino acids substitutions, additions or deletions; (ii) differs from a sequence in the Sequence Table in at most 5, 4, 3, 2, or 1 amino acids substitutions, additions or deletions; (iii) differs from a sequence in the Sequence Table in 1-5, 1-3, 1-2, 2-5 or 3-5 amino acids substitutions, additions or deletions and/or (iv) comprises an amino acid sequence that is at least about 75%, 80%, 85%, 90%, 95%, 96%, 97%, 98% or 99% identical to a sequence in the Sequence Table, wherein in any of (i)-(iv), an amino acid substitution may be a conservative amino acid substitution or a non-conservative amino acid substitution; and wherein the biological activity of the constant region is not significantly changed by these mutation(s).

[0207] Heavy chain constant regions may comprise a combination of mutations that confer onto an antibody comprising the heavy chain region a combination of the biological activities conferred by each individual mutation. For example, one or more mutation that enhances agonist activity formation of large cell surface complexes or that enhance internalization of the antibody can be combined with one or more mutation that modulate effector function. Exemplary constant chain sequences comprising a combination of mutations conferring different biological functions are set forth in the Sequence Table.

II. Antibodies with Modified Heavy Chain Constant Regions and Target Antigens Thereof

[0208] Modified heavy chain constant regions can be used in a wide range of antibodies, such as antibodies that require internalization (e.g., antibody drug conjugates (ADCs), and anti-CD73 antibodies), agonist activity (e.g., antibodies that are effective in modulating immune responses, e.g., in stimulating T cell activation, such as agonist anti-GITR antibodies), antagonist activity (e.g., antibodies that inhibit or block a protein that inhibits an immune response, e.g., T cell activation, such as an antagonist PD-1 antibody), effector function, e.g., ADCC and CDC, or reduced effector function, signal transduction, or anti-tumor activity. For example, internalization of a cell surface inhibitory receptor may limit its ability to interact with its receptor(s) and decrease cell function(s).

[0209] In one embodiment, antibodies comprising a modified heavy chain constant domain are antibodies that require their internalization for activity (e.g., antibodies that are specific for cell surface receptors) by, e.g., inducing receptor-mediated endocytosis when they bind to the cell surface. Such antibodies may be used as vehicles for targeted delivery of drugs, toxins, enzymes or DNA for therapeutic applications Therefore, increasing the internalization properties of these antibodies is desirable. Exemplary antibodies that may benefit from effective internalization are antibody drug conjugates. Various assays for measuring the internalization properties of an antibody are known in the art and described herein. These assays utilize, for example, a wide range of dyes for antibody labeling that can be used in wash or quench-based assays to monitor internalization. Antibody internalization can also be monitored in no-wash assays which rely on fluorescent labels.

[0210] In one embodiment, antibodies comprising a modified heavy chain constant domain are antibodies that require the internalization of the antigen to which they bind, e.g., a cell surface molecule, such as a receptor or a ligand, for activity. Thus, antibodies to cell surface proteins that require to be downregulated for biological (e.g., therapeutic) activity can use a modified heavy chain constant region described herein.

[0211] In certain embodiments, antibodies comprising a modified heavy chain constant domain bind to cell surface molecules and agonize or antagonize the biological activity of the cell surface molecule, e.g., a cell surface molecule on an immune cell, e.g., a T cell, Teff cell, Th1 cell, Th2 cell, CD4+ T cell, CD8+ T cell, Treg cell, dendritic cell, macrophage, monocyte, Langerhans cell, NK cell, myeloid derived suppressor cell, B cell or any other immune cell. The cell surface molecule may be a stimulatory, e.g., co-stimulatory molecule (e.g., GITR, OX40, CD137, CD40, ICOS and other TNFR family members), and the antibody may further stimulate the activity (an agonist antibody) or the antibody may inhibit the activity (an antagonist antibody). The cell surface molecule may be an inhibitory molecule (e.g., CTLA-4, PD-1, PD-L1, LAG-3, TIM-3), and the antibody may further stimulate the activity (an agonist antibody) or the antibody may inhibit the activity (an antagonist antibody).

[0212] In certain embodiments, antibodies comprising a modified heavy chain constant domain are agonist antibodies of stimulatory (or co-stimulatory) molecules that, e.g., boost the immune system of a subject, e.g., by inducing IL-2 and/or IFN-γ secretion from T cells (e.g., anti-GITR antibodies). Other agonist antibodies have been shown to activate APCs, promote antitumor T-cell responses, and/or foster cytotoxic myeloid cells with the potential to control cancer in the absence of T-cell immunity. Agonist antibodies of stimulatory molecules are different from antagonist antibodies of inhibitory molecules, which block negative immune checkpoint such as anti-CTLA-4 or anti-PD-1. Agonist activity, such as T cell proliferation, can be measured using a variety of methods known in the art.

[0213] In certain embodiments, antibodies comprising a modified heavy chain constant domain are antagonist antibodies of checkpoint inhibitors boost the immune response of a subject by blocking or inhibiting negative immune checkpoint, such as anti-CTLA-4 or anti-PD-1 antibodies, e.g., by targeting the inhibitory receptor expressed on activated T-cells. Antagonist activity, such as inhibition of T cell proliferation can be measured using a variety of methods known in the art.

[0214] In one embodiment, the antibody is (i) an agonist of a co-stimulatory receptor or (ii) an antagonist of an inhibitory signal on, e.g., T cells, both of which may result in amplifying immune responses, e.g., antigen-specific T cell responses, (immune checkpoint regulators). In certain embodiments, an antibody is (i) an antagonist of a co-stimulatory receptor or (ii) an agonist of an inhibitory signal, e.g., on T cells. Co-stimulatory and co-inhibitory molecules may be members of the immunoglobulin super family (IgSF), and antibodies having modified heavy chain constant regions may bind to any of them. One important family of membrane-bound ligands that bind to co-stimulatory or co-inhibitory receptors is the B7 family, which includes B7-1, B7-2, B7-H1 (PD-L1), B7-DC (PD-L2), B7-H2 (ICOS-L), B7-H3, B7-H4, B7-H5 (VISTA), and B7-H6, and antibodies having modified heavy chain constant regions may bind to any of them. Another family of membrane bound ligands that bind to co-stimulatory or co-inhibitory receptors is the TNF family of molecules that bind to cognate TNF receptor (TNFR) family members, which include CD40 and CD40L, OX-40, OX-40L, CD70, CD27L, CD30, CD30L, 4-1BBL, CD137, TRAIL/Apo2-L, TRAILR1/DR4, TRAILR2/DR5, TRAILR3, TRAILR4, OPG, RANK, RANKL, TWEAKR/Fn14, TWEAK, BAFFR, EDAR, XEDAR, TACI, APRIL, BCMA, LTβR, LIGHT, DcR3, HVEM, VEG1/TL1A, TRAMP/DR3, EDAR, EDA1, XEDAR, EDA2, TNFR1, Lymphotoxin α/TNFβ, TNFR2, TNFα, LTα, LTβ, LTβR, Lymphotoxin α 1β2, FAS, FASL (CD178), DR3 (TNFRSF25), RELT, DR6, TROY, NGFR (see, e.g., Tansey (2009) Drug Discovery Today 00:1). Thus, the antibodies described herein can bind to any of these surface molecules, and they can be, e.g., (i) agonists or antagonists (or inhibitors or blocking agents) of proteins of the IgSF family or B7 family or the TNFR family that inhibit T cell activation or antagonists of cytokines that inhibit T cell activation (e.g., IL-6, IL-10, TGF-ß, VEGF; “immunosuppressive cytokines”) and/or (ii) agonists or antagonists of stimulatory receptors of the IgSF family, B7 family or the TNF family or of cytokines that stimulate T cell activation, for modulating, e.g., stimulating, an immune response, e.g., for treating proliferative diseases, such as cancer.

[0215] Accordingly, an antibody with a modified heavy chain constant domain may be used as one of the following agents:
[0216] (1) An agonist of a protein that stimulates, e.g., T cell activation, such as B7-1, B7-2, CD28, 4-1BB (CD137), 4-1BBL, GITR, ICOS, ICOS-L, OX40, OX40L, CD70, CD27, CD40, DR3 or CD28H; or
[0217] (2) An antagonist (inhibitor or blocking agent) of a protein that inhibits T cell activation (e.g., immune checkpoint inhibitors), such as CTLA-4, PD-1, PD-L1, PD-L2, and LAG-3, as described above, and any of the following proteins: TIM-3, Galectin 9, CEACAM-1, BTLA, CD69, Galectin-1, TIGIT, CD113, GPR56, VISTA, 2B4, CD48, GARP, CD73, PD1H, LAIR1, TIM-1, TIM-4, CD39.

[0218] Other antibodies include antagonists of inhibitory receptors on NK cells and agonists of activating receptors on NK cells, e.g., KIR, TIGIT, NKG2A.

[0219] Generally, antibodies that may benefit from a modified heavy chain constant region include, e.g., agonist antibodies that ligate positive costimulatory receptors, blocking antibodies that attenuate signaling through inhibitory receptors, antagonist antibodies, and antibodies that increase systemically the frequency of anti-tumor T cells, antibodies that overcome distinct immune suppressive pathways within the tumor microenvironment (e.g., block inhibitory receptor engagement (e.g., PD-L1/PD-1 interactions), deplete or inhibit Tregs (e.g., an anti-CD25 monoclonal antibody, inhibit metabolic enzymes such as IDO, or reverse/prevent T cell anergy or exhaustion) and antibodies that trigger innate immune activation and/or inflammation at tumor sites. An increased internalization of inhibitory receptors may translate into a lower level of a potential inhibitor.

[0220] In certain embodiments, an antibody comprising a modified heavy chain constant region is an antibody that is conjugated to a therapeutic agent to form an immunoconjugate, such as an antibody drug conjugate (ADC), which immunoconjugate requires internalization for its activity. In an ADC, the antibody functions as a targeting agent for directing the ADC to a target cell expressing its antigen, such as an antigen on a cancer cell. In this case, the antigen may be a tumor associated antigen, i.e., one that is uniquely expressed or overexpressed by the cancer cell. Once there, the drug is released, either inside the target cell or in its vicinity, to act as a therapeutic agent. For a review on the mechanism of action and use of ADCs in cancer therapy, see Schrama et al., Nature Rev. Drug Disc. 2006, 5, 147.

[0221] For cancer treatment, the therapeutic agent or drug of an ADC preferably is a cytotoxic drug that causes death of the targeted cancer cell. Cytotoxic drugs that can be used in ADCs include the following types of compounds and their analogs and derivatives:
[0222] (a) enediynes such as calicheamicin (see, e.g., Lee et al., J. Am. Chem. Soc. 1987, 109, 3464 and 3466) and uncialamycin (see, e.g., Davies et al., WO 2007/038868 A2 (2007) and Chowdari et al., U.S. Pat. No. 8,709,431 B2 (2012));
[0223] (b) tubulysins (see, e.g., Domling et al., U.S. Pat. No. 7,778,814 B2 (2010); Cheng et al., U.S. Pat. No. 8,394,922 B2 (2013); and Cong et al., US 2014/0227295 A1;
[0224] (c) CC-1065 and duocarmycin (see, e.g., Boger, U.S. Pat. No. 6,5458,530 B1 (2003); Sufi et al., U.S. Pat. No. 8,461,117 B2 (2013); and Zhang et al., US 2012/0301490 A1 (2012)); (d) epothilones (see, e.g., Vite et al., US 2007/0275904 A1 (2007) and U.S. RE42930 E (2011));
[0225] (e) auristatins (see, e.g., Senter et al., U.S. Pat. No. 6,844,869 B2 (2005) and Doronina et al., U.S. Pat. No. 7,498,298 B2 (2009));
[0226] (f) pyrrolobezodiazepine (PBD) dimers (see, e.g., Howard et al., US 2013/0059800 A1(2013); US 2013/0028919 A1 (2013); and WO 2013/041606 A1 (2013)); and
[0227] (g) maytansinoids such as DM1 and DM4 (see, e.g., Chari et al., U.S. Pat. No. 5,208,020 (1993) and Amphlett et al., U.S. Pat. No. 7,374,762 B2 (2008)).

[0228] In ADCs, the antibody and therapeutic agent may be conjugated via a linker, e.g., a cleavable linker, such as a peptidyl, disulfide, or hydrazone linker. For example, the linker may be a peptidyl linker such as Val-Cit, Ala-Val, Val-Ala-Val, Lys-Lys, Pro-Val-Gly-Val-Val, Ala-Asn-Val, Val-Leu-Lys, Ala-Ala-Asn, Cit-Cit, Val-Lys, Lys, Cit, Ser, or Glu. The ADCs can be prepared as described in U.S. Pat. Nos. 7,087,600; 6,989,452; and 7,129,261; PCT Publications WO 02/096910; WO 07/038658; WO 07/051081; WO 07/059404; WO 08/083312; and WO 08/103693; U.S. Patent Publications 20060024317; 20060004081; and 20060247295; the disclosures of which are incorporated herein by reference.

[0229] Exemplary targets of ADCs that may be enhanced with a modified heavy chain constant region include B7H4 (Korman et al., US 2009/0074660 A1); CD19 (Rao-Naik et al., 8,097,703 B2); CD22 (King et al., US 2010/0143368 A1); CD30 (Keler et al., U.S. Pat. No. 7,387,776 B2 (2008); CD70 (Terrett et al., U.S. Pat. No. 8,124,738 B2); CTLA-4 (Korman et al., U.S. Pat. No. 6,984,720 B1 (2006)); PD-1 (Korman et al., U.S. Pat. No. 8,008,449 B2 (2011); PSMA (Huang et al., US 2009/0297438 A1 and Cardarelli et al., U.S. Pat. No. 7,875,278 B2); PTK7 (Terrett et al., US 2010/0034826 A1); glypican-3 (Terrett et al., US 2010/0209432 (A1)); RG1 (Harkins et al., U.S. Pat. No. 7,335,748 B2(2008)); mesothelin (Terrett et al., U.S. Pat. No. 8,268,970 B2 (2012)); and CD44 (Xu et al., US 2010/0092484 A1).

[0230] The modified heavy chain constant domains may also be part of antibodies for uses outside of oncology, e.g., immunological diseases, such as rheumatoid arthritis, lupus etc.

[0231] The modified heavy chain constant domains may also be fused to non antibody molecules (or antibody variants) or fragments thereof, and may be fused to any polypeptide that needs the presence of an Fc. A modified heavy chain constant domain may be fused to an antigen binding fragment of an antibody, as further defined herein (e.g., in the definition section).

[0232] In certain embodiments, a heavy chain constant domain or portion thereof comprising a P238K mutation, which is devoid of certain effector function, is fused to a polypeptide, e.g., the heavy chain portion of an antigen binding fragment of an antibody. As further described herein, an IgG, e.g., IgG1, Fc comprising a P238K mutation, and comprising, e.g., the amino acid sequence set forth in SEQ ID NO: 198, may be fused to a heavy chain variable domain of an antibody, wherein the antibody binds to any target, e.g., a target protein described herein (e.g., CD40 or CD40L). An IgG1 Fc with a P238K mutation (e.g., P238K IgG1 fa having the amino acid sequence SEQ ID NO: 198 or in the context of IgG1 having allotype f) may be used in any antibody or with any antigen binding fragment thereof for which effector function, in particular binding to FcγRs CD32a, CD32b and CD16a, is not desired. In addition to P238K, a heavy chain constant region may comprise an additional 1 or 2 mutations, e.g., substitutions, that reduce binding to FcγR CD64, or P238K may be used in the context of an IgG2 hinge, e.g., an IgG2 hinge comprising C219S, as further described herein.

### III. Methods of Modifying the Biological Activity of Antibodies

[0233] Provided herein are methods for enhancing the biological activity of certain antibodies, such as the one or more of the following biological activities:

[0234] (a) increased or altered internalization by a cell;

[0235] (b) increased or altered agonist activity;

[0236] (c) increased or altered antagonist or blocking activity;

[0237] (d) enhanced or reduced ADCC;

[0238] (d) generation of a new property;

[0239] (e) increased or altered signal transduction;

[0240] (f) formation of larger antibody/antigen cross-linked complexes;

[0241] (g) increased clustering or oligomerization of the target cell surface molecule;

[0242] (h) increased stimulation or enhancement of an immune response; and/or

[0243] (i) increased inhibition of an immune response.

[0244] A method for enhancing a biological activity of an antibody may comprise replacing the heavy chain constant region or a portion thereof, e.g., the hinge and/or CH1 domain, with a modified heavy chain constant region or portion thereof, e.g., an IgG2 hinge and/or IgG2 CH1 domain.

[0245] In certain embodiments, a method for improving the biological activity of an antibody comprises (i) providing an antibody that does not comprise a modified heavy chain constant region as described herein; and (ii) replacing the heavy chain constant region of the antibody with a modified heavy chain constant region, or a portion thereof, that enhances the biological activity of the antibody. In certain embodiments, a method for improving the biological activity of an antibody comprises (i) providing an antibody that comprises a non-IgG2 hinge (e.g., an IgG1 hinge, an IgG3 hinge or an IgG4 hinge); and (ii) replacing the non-IgG2 hinge of the antibody with an IgG2 hinge. In certain embodiments, a method for improving the biological activity of an antibody comprises (i) providing an antibody that comprises a non-enhancing IgG2 hinge; and (ii) replacing the non-enhancing IgG2 hinge of the antibody with an IgG2 hinge. A “non-enhancing IgG2 hinge” is a variant IgG2 hinge that differs from an IgG2 hinge in such a way that it no longer has the required characteristic for enhancing the biologic activity of an antibody, e.g., a variant hinge that no longer has the stiffness of a wildtype IgG2 hinge.

[0246] Exemplary methods for enhancing the biological activity of an antibody comprise (i) providing an antibody that comprises a non-IgG2 hinge or a non-enhancing IgG2 hinge, and (ii) replacing the hinge with a hinge comprising SEQ ID NO: 8, 21, 22, 23, 126-132, 134-136 or 137 or variants thereof, e.g., the variants described herein. Methods for enhancing the biological activity of an antibody may also comprise (i) providing an antibody that comprises heavy chain constant region that is not a modified heavy chain constant region, and (ii) replacing the heavy chain constant region with a modified heavy chain constant region. Replacing the heavy chain constant region may comprise replacing the CH1, hinge, CH2 and/or CH3 domain. For example, a heavy chain constant region may be modified, by replacing the hinge with an IgG2 hinge or variant thereof, and/or by replacing the CH1 domain with an IgG1 or IgG2 CH1 domain or variant thereof. In certain embodiments, the hinge is replaced with an IgG2 hinge and the CH2 domain is replaced with an IgG1 CH2 domain. In certain embodiments, the hinge is replaced with an IgG2 hinge and the CH3 domain is replaced with an IgG1 CH3 domain. In certain embodiments, the hinge is replaced with an IgG2 hinge, the CH1 is replaced with an IgG2 hinge, the CH2 domain is replaced with an IgG1 CH2 domain and the CH3 domain is replaced with an IgG1 CH3 domain. In certain embodiments, a heavy chain constant region is replaced with a modified heavy chain regions 1-27 set forth in Table 5 above or the heavy chain constant regions set forth in Table 6 or described herein.

[0247] Also provided herein are methods for enhancing the biological activity of an IgG1 or IgG2 antibody, comprising deleting 1-10 amino acids in the hinge of the IgG1 or IgG2 antibody, respectively. For example, one or more of amino acids S219, C22, D221, K222, T223, H224 and T225 can be deleted. In one embodiment, all of amino acids S219, C22, D221, K222, T223, H224 and T225 are deleted.

[0248] Further provided herein are methods for making and providing effectorless antibodies or antigen-binding fragments thereof, e.g., by mutating P238, e.g., to P238K, to eliminate or reduce the effector function of an antibody.

[0249] In certain embodiments, replacing the heavy chain constant region of an antibody, e.g., to modify its biological activity, is not accompanied by a reduction or a significant reduction of its binding activity to the target antigen. As described in the Examples, substituting the heavy chain constant region of anti-GITR and anti-CD73 antibodies did not significantly change their affinity for the human GITR and human CD73 antigens, respectively.

[0250] It will be understood that when referring to replacing a domain of a specific isotype with the same domain of a different isotype or with a domain including a mutation, e.g., a P238 mutation, it is not necessary to literally replace the domain, but rather, it may only be necessary to change the amino acids that are different between the two isotypes.

[0251] Standard assays to evaluate the binding ability of the antibodies toward an antigen of various species are known in the art and are further described herein, and include for example, ELISAs, Western blots, and RIAs. Suitable assays are described in detail in the Examples. The binding kinetics (e.g., binding affinity) of the antibodies also can be assessed by standard assays known in the art, such as by BIACORE® SPR analysis. Assays to evaluate the properties of antibodies having modified constant regions (e.g., ligand binding, T cell proliferation, cytokine production) are described in further detail infra and in the Examples.

[0252] Exemplary antibodies that can be modified as described herein include, e.g., antibodies for treating cancer, such as: Yervoy™ (ipilimumab) or Tremelimumab (to CTLA-4), galiximab (to B7.1), BMS-936558 (to PD-1), CT-011 (to PD-1), MK-3475 (to PD-1), AMP224 (to B7DC), BMS-936559 (to B7-H1), MPDL3280A (to B7-H1), MEDI-570 (to ICOS), AMG557 (to B7H2), MGA271 (to B7H3), IMP321 (to LAG-3), BMS-663513 (to CD137), PF-05082566 (to CD137), CDX-1127 (to CD27), anti-OX40 (Providence Health Services), huMAbOX40L (to OX40L), Atacicept (to TACI), CP-870893 (to CD40), Lucatumumab (to CD40), Dacetuzumab (to CD40), Muromonab-CD3 (to CD3), Ipilumumab (to CTLA-4).

[0253] Other antibodies that can be modified as described herein include PD-1 and PD-L1 antagonist antibodies. An exemplary anti-PD-1 antibody that may be modified as described herein is nivolumab (BMS-936558); an antibody that comprises the CDRs or variable regions of one of antibodies 17D8, 2D3, 4H1, 5C4, 7D3, 5F4 and 4A11 described in WO 2006/121168; MK-3475 (Lambrolizumab) described in WO2012/145493; AMP-514 described in WO 2012/145493; CT-011 (Pidilizumab; previously CT-AcTibody or BAT; see, e.g., Rosenblatt et al. (2011) J. Immunotherapy 34:409); those described in WO 2009/014708, WO 03/099196, WO 2009/114335, WO 2011/066389, WO 2011/161699, WO 2012/145493, WO2013/173223, U.S. Pat. Nos. 7,635,757 and 8,217,149, and U.S. Patent Publication No. 2009/0317368.

[0254] Further antibodies that may be modified include anti-PD-L1 antibodies, e.g., BMS-936559 (referred to as 12A4 in WO 2007/005874 and U.S. Pat. No. 7,943,743); an antibody that comprises the CDRs or variable regions of 3G10, 12A4, 10A5, 5F8, 10H10, 1B12, 7H1, 11E6, 12B7 and 13G4, which are described in PCT Publication WO 07/005874 and U.S. Pat. No. 7,943,743; MEDI4736 (also known as Anti-B7-H1); MPDL3280A (also known as RG7446); any of the anti-PD-L1 antibodies disclosed in WO2013/173223, WO2011/066389, WO2012/145493, U.S. Pat. Nos. 7,635,757 and 8,217,149 and U.S. Publication No. 2009/145493.

[0255] Other antibodies that may be modified include anti-CTLA-4 antibodies, e.g., Yervoy™ (ipilimumab or antibody 10D1, described in PCT Publication WO 01/14424); tremelimumab (formerly ticilimumab, CP-675,206); monoclonal or an anti-CTLA-4 antibody described in any of the following publications: WO 98/42752; WO 00/37504; U.S. Pat. No. 6,207,156; Hurwitz et al. (1998) Proc. Natl. Acad. Sci. USA 95(17):10067-10071; Camacho et al. (2004) J. Clin. Oncology 22(145): Abstract No. 2505 (antibody CP-675206); and Mokyr et al. (1998) Cancer Res. 58:5301-5304; and any of the anti-CTLA-4 antibodies disclosed in WO2013/173223.

[0256] Other antibodies that may be modified include anti-LAG-3 antibodies, e.g., BMS-986016; IMP731 described in US 2011/007023; and IMP-321.

[0257] Other antibodies that may be modified include anti-GITR agonist antibodies, e.g., the anti-GITR antibody 6C8 or humanized versions thereof, described in WO2006/105021; an antibody described in WO2011/028683; and an antibody described in JP2008278814.

[0258] Antibodies that target other antigens, including those described elsewhere herein, may also be modified. For example, anti-Her2 antibodies that require internalization, e.g., trastuzumab (Herceptin), may be modified as described herein.

### IV. Additional Heavy Chain Constant Domain Modifications

[0259] In addition to the modifications described herein to antibodies to enhance their biological activity or reduce effector function, further mutations can be made, e.g., to the CH1, hinge, CH2 or CH3 domain, e.g., to further reduce the effector function, binding to FcγRs, and/or the stability of the antibodies. For example, any of the modifications described herein, e.g., below, may be combined with a P238, e.g., P238K, mutation, such as in an IgG1 or IgG1-IgG2 hybrid Fc or portion thereof.

### Fcs and Modified Fcs

[0260] Antibodies described herein may comprise an Fc comprising one or more modifications, typically to alter one or more functional properties of the antibody, such as serum half-life, complement fixation, Fc receptor binding, and/or antigen-dependent cellular cytotoxicity. For example, one may make modifications in the Fc region in order to generate an Fc variant with (a) increased or decreased antibody-dependent cell-mediated cytotoxicity (ADCC), (b) increased or decreased complement mediated cytotoxicity (CDC), (c) increased or decreased affinity for Clq and/or (d) increased or decreased affinity for a Fc receptor relative to the parent Fc. Such Fc region variants will generally comprise at least one amino acid modification in the Fc region. Combining amino acid modifications is thought to be particularly desirable. For example, the variant Fc region may include two, three, four, five, etc substitutions therein, e.g. of the specific Fc region positions identified herein. Exemplary Fc sequence variants are disclosed herein, and are also provided at U.S. Pat. Nos. 5,624,821; 6,277,375; 6,737,056; 6,194,551; 7,317,091; 8,101,720; PCT Patent Publications WO 00/42072; WO 01/58957; WO 04/016750; WO 04/029207; WO 04/035752; WO 04/074455; WO 04/099249; WO 04/063351; WO 05/070963; WO 05/040217, WO 05/092925 and WO 06/020114.

### Reducing Effector Function

[0261] ADCC activity may be reduced by modifying the Fc region. In certain embodiments, sites that affect binding to Fc receptors may be removed (e.g., by mutation), preferably sites other than salvage receptor binding sites. In other embodiments, an Fc region may be modified to remove an ADCC site. ADCC sites are known in the art; see, for example, Sarmay et al. (1992) Molec. Immunol. 29 (5): 633-9 with regard to ADCC sites in IgG1. In one embodiment, the G236R and L328R variant of human IgG1 effectively eliminates FcγR binding. Horton et al. (2011) J. Immunol. 186:4223 and Chu et al. (2008) Mol. Immunol. 45:3926. In other embodiments, the Fc having reduced binding to FcγRs comprised the amino acid substitutions L234A, L235E and G237A. Gross et al. (2001) Immunity 15:289.

[0262] CDC activity may also be reduced by modifying the Fc region. Mutations at IgG1 positions D270, K322, P329 and P331, specifically alanine mutations D270A, K322A, P329A and P331A, significantly reduce the ability of the corresponding antibody to bind Clq and activate complement. Idusogie et al. (2000) J. Immunol. 164:4178; WO 99/51642. Modification of position 331 of IgG1 (e.g. P331S) has been shown to reduce complement binding. Tao et al. (1993) J. Exp. Med. 178:661 and Canfield & Morrison (1991) J. Exp. Med. 173:1483. In another example, one or more amino acid residues within amino acid positions 231 to 239 are altered to thereby reduce the ability of the antibody to fix complement. WO 94/29351.

[0263] In some embodiments, the Fc with reduced complement fixation has the amino acid substitutions A330S and P331S. Gross et al. (2001) Immunity 15:289.

[0264] For uses where effector function is to be avoided altogether, e.g. when antigen binding alone is sufficient to generate the desired therapeutic benefit, and effector function only leads to (or increases the risk of) undesired side effects, IgG4 antibodies may be used, or antibodies or fragments lacking the Fc region or a substantial portion thereof can be devised, or the Fc may be mutated to eliminate glycosylation altogether (e.g. N297A). Alternatively, a hybrid construct of human IgG2 (CH1 domain and hinge region) and human IgG4 (CH2 and CH3 domains) has been generated that is devoid of effector function, lacking the ability to bind the FcγRs (like IgG2) and unable to activate complement (like IgG4). Rother et al. (2007) Nat. Biotechnol. 25:1256. See also Mueller et al. (1997) Mol. Immunol. 34:441; Labrijn et al. (2008) Curr. Op. Immunol. 20:479 (discussing Fc modifications to reduce effector function generally).

[0265] In other embodiments, the Fc region is altered by replacing at least one amino acid residue with a different amino acid residue to reduce all effector function(s) of the antibody. For example, one or more amino acids selected from amino acid residues 234, 235, 236, 237, 297, 318, 320 and 322 can be replaced with a different amino acid residue such that the antibody has decreased affinity for an effector ligand but retains the antigen-binding ability of the parent antibody. The effector ligand to which affinity is altered can be, for example, an Fc receptor (residues 234, 235, 236, 237, 297) or the C1 component of complement (residues 297, 318, 320, 322). U.S. Pat. Nos. 5,624,821 and 5,648,260, both by Winter et al.

[0266] WO 88/007089 proposed modifications in the IgG Fc region to decrease binding to FcγRI to decrease ADCC (234A; 235E; 236A; G237A) or block binding to complement component Clq to eliminate CDC (E318A or V/K320A and K322A/Q). See also Duncan & Winter (1988) Nature 332:563; Chappel et al. (1991) Proc. Nat'l Acad. Sci. (USA) 88:9036; and Sondermann et al. (2000) Nature 406:267 (discussing the effects of these mutations on FcγRIII binding).

[0267] Fc modifications reducing effector function also include substitutions, insertions, and deletions at positions 234, 235, 236, 237, 267, 269, 325, and 328, such as 234G, 235G, 236R, 237K, 267R, 269R, 325L, and 328R. An Fc variant may comprise 236R/328R. Other modifications for reducing FcyR and complement interactions include substitutions 297A, 234A, 235A, 237A, 318A, 228P, 236E, 268Q, 309L, 330S, 331 S, 220S, 226S, 229S, 238S, 233P, and 234V. These and other modifications are reviewed in Strohl (2009) Current Opinion in Biotechnology 20:685-691. Effector functions (both ADCC and complement activation) can be reduced, while maintaining neonatal FcR binding (maintaining half-life), by mutating IgG residues at one or more of positions 233-236 and 327-331, such as E233P, L234V, L235A, optionally G2364, A327G, A330S and P331S in IgG1; E233P, F234V, L235A, optionally G2364 in IgG4; and A330S and P331S in IgG2. See Armour et al. (1999) Eur. J Immunol. 29:2613; WO 99/58572. Other mutations that reduce effector function include L234A and L235A in IgG1 (Alegre et al. (1994) Transplantation 57:1537); V234A and G237A in IgG2 (Cole et al. (1997) J. Immunol. 159:3613; see also U.S. Pat. No. 5,834,597); and S228P and L235E for IgG4 (Reddy et al. (2000) J. Immunol. 164:1925). Another combination of mutations for reducing effector function in a human IgG1 include L234F, L235E and P331S. Oganesyan et al. (2008) Acta Crystallogr. D. Biol. Crystallogr. 64:700. See generally Labrijn et gal. (2008) Curr. Op. Immunol. 20:479. Additional mutations found to decrease effector function in the context of an Fc (IgG1) fusion protein (abatacept) are C226S, C229S and P238S (EU residue numbering). Davis et al. (2007) J Immunol. 34:2204.

[0268] Other Fc variants having reduced ADCC and/or CDC are disclosed at Glaesner et al. (2010) Diabetes Metab. Res. Rev. 26:287 (F234A and L235A to decrease ADCC and ADCP in an IgG4); Hutchins et al. (1995) Proc. Nat'l Acad. Sci. (USA) 92:11980 (F234A, G237A and E318A in an IgG4); An et al. (2009) MAbs 1:572 and U.S. Pat. App. Pub. 2007/0148167 (H268Q, V309L, A330S and P331S in an IgG2); McEarchern et al. (2007) Blood 109:1185 (C226S, C229S, E233P, L234V, L235A in an IgG1); Vafa et al. (2014) Methods 65:114 (V234V, G237A, P238S, H268A, V309L, A330S, P331S in an IgG2).

[0269] In certain embodiments, an Fc is chosen that has essentially no effector function, i.e., it has reduced binding to FcγRs and reduced complement fixation. An exemplary Fc, e.g., IgG1 Fc, that is effectorless comprises the following five mutations: L234A, L235E, G237A, A330S and P331S. Gross et al. (2001) Immunity 15:289. These five substitutions may be combined with N297A to eliminate glycosylation as well.

### Enhancing Effector Function

[0270] Alternatively, ADCC activity may be increased by modifying the Fc region. With regard to ADCC activity, human IgG1 IgG3>>IgG4 IgG2, so an IgG1 constant domain, rather than an IgG2 or IgG4, might be chosen for use in a drug where ADCC is desired. Alternatively, the Fc region may be modified to increase antibody dependent cellular cytotoxicity (ADCC) and/or to increase the affinity for an Fcγ receptor by modifying one or more amino acids at the following positions: 234, 235, 236, 238, 239, 240, 241, 243, 244, 245, 247, 248, 249, 252, 254, 255, 256, 258, 262, 263, 264, 265, 267, 268, 269, 270, 272, 276, 278, 280, 283, 285, 286, 289, 290, 292, 293, 294, 295, 296, 298, 299, 301, 303, 305, 307, 309, 312, 313, 315, 320, 322, 324, 325, 326, 327, 329, 330, 331, 332, 333, 334, 335, 337, 338, 340, 360, 373, 376, 378, 382, 388, 389, 398, 414, 416, 419, 430, 433, 434, 435, 436, 437, 438 or 439. See WO 2012/142515; see also WO 00/42072. Exemplary substitutions include 236A, 239D, 239E, 268D, 267E, 268E, 268F, 324T, 332D, and 332E. Exemplary variants include 239D/332E, 236A/332E, 236A/239D/332E, 268F/324T, 267E/268F, 267E/324T, and 267E/268F/324T. For example, human IgG1Fcs comprising the G236A variant, which can optionally be combined with 1332E, have been shown to increase the FcγIIA/FcγIIB binding affinity ratio approximately 15-fold. Richards et al. (2008) Mol. Cancer Therap. 7:2517; Moore et al. (2010) mAbs 2:181. Other modifications for enhancing FcγR and complement interactions include but are not limited to substitutions 298A, 333A, 334A, 326A, 2471, 339D, 339Q, 280H, 290S, 298D, 298V, 243L, 292P, 300L, 396L, 3051, and 396L. These and other modifications are reviewed in Strohl (2009) Current Opinion in Biotechnology 20:685-691. Specifically, both ADCC and CDC may be enhanced by changes at position E333 of IgG1, e.g. E333A. Shields et al. (2001) J. Biol. Chem. 276:6591. The use of P2471 and A339D/Q mutations to enhance effector function in an IgG1 is disclosed at WO 2006/020114, and D280H, K290S±S298DN is disclosed at WO 2004/074455. The K326A/W and E333A/S variants have been shown to increase effector function in human IgG1, and E333S in IgG2. Idusogie et al. (2001) J. Immunol. 166:2571.

[0271] Specifically, the binding sites on human IgG1 for FcγR1, FcγRII, FcγRIII and FcRn have been mapped, and variants with improved binding have been described. Shields et al. (2001) J. Biol. Chem. 276:6591-6604. Specific mutations at positions 256, 290, 298, 333, 334 and 339 were shown to improve binding to FcγRIII, including the combination mutants T256A/S298A, S298A/E333A, S298A/K224A and S298A/E333A/K334A (having enhanced FcγRIIIa binding and ADCC activity). Other IgG1 variants with strongly enhanced binding to FcγRIIIa have been identified, including variants with S239D/I332E and S239D/I332E/A330L mutations which showed the greatest increase in affinity for FcγRIIIa, a decrease in FcγRIIb binding, and strong cytotoxic activity in cynomolgus monkeys. Lazar et al. (2006) Proc. Nat'l Acad Sci. (USA) 103:4005; Awan et al. (2010) Blood 115:1204; Desjarlais & Lazar (2011) Exp. Cell Res. 317:1278. Introduction of the triple mutations into antibodies such as alemtuzumab (CD52-specific), trastuzumab (HER2/neu-specific), rituximab (CD20-specific), and cetuximab (EGFR-specific) translated into greatly enhanced ADCC activity in vitro, and the S239D/I332E variant showed an enhanced capacity to deplete B cells in monkeys. Lazar et al. (2006) Proc. Nat'l Acad Sci. (USA) 103:4005. In addition, IgG1 mutants containing L235V, F243L, R292P, Y300L, V3051 and P396L mutations which exhibited enhanced binding to FcγRIIIa and concomitantly enhanced ADCC activity in transgenic mice expressing human FcγRIIIa in models of B cell malignancies and breast cancer have been identified. Stavenhagen et al. (2007) Cancer Res. 67:8882; U.S. Pat. No. 8,652,466; Nordstrom et al. (2011) Breast Cancer Res. 13:R123.

[0272] Different IgG isotypes also exhibit differential CDC activity (IgG3>IgG1>>IgG2≈=4G4). Dangl et al. (1988) EMBO J. 7:1989. For uses in which enhanced CDC is desired, it is also possible to introduce mutations that increase binding to Clq. The ability to recruit complement (CDC) may be enhanced by mutations at K326 and/or E333 in an IgG2, such as K326W (which reduces ADCC activity) and E333S, to increase binding to Clq, the first component of the complement cascade. Idusogie et al. (2001) J. Immunol. 166:2571. Introduction of S267E/H268F/S324T (alone or in any combination) into human IgG1 enhances Clq binding. Moore et al. (2010) mAbs 2:181. The Fc region of the IgG1/IgG3 hybrid isotype antibody “113F” of Natsume et al. (2008) Cancer Res. 68:3863 (FIG. 1 therein) also confers enhanced CDC. See also Michaelsen et al. (2009) Scand. J. Immunol. 70:553 and Redpath et al. (1998) Immunology 93:595.

[0273] Additional mutations that can increase or decrease effector function are disclosed at Dall'Acqua et al. (2006) J. Immunol. 177:1129. See also Carter (2006) Nat. Rev. Immunol. 6:343; Presta (2008) Curr. Op. Immunol. 20:460.

[0274] Fc variants that enhance affinity for the inhibitory receptor FcγRIIb may also be used, e.g. to enhance apoptosis-inducing or adjuvant activity. Li & Ravetch (2011) Science 333:1030; Li & Ravetch (2012) Proc. Nat'l Acad. Sci (USA) 109:10966; U.S. Pat. App. Pub. 2014/0010812. Such variants may provide an antibody with immunomodulatory activities related to FcγRIIb⁺ cells, including for example B cells and monocytes. In one embodiment, the Fc variants provide selectively enhanced affinity to FcγRIIb relative to one or more activating receptors. Modifications for altering binding to FcγRIIb include one or more modifications at a position selected from the group consisting of 234, 235, 236, 237, 239, 266, 267, 268, 325, 326, 327, 328, and 332, according to the EU index. Exemplary substitutions for enhancing FcγRIIb affinity include but are not limited to 234D, 234E, 234F, 234W, 235D, 235F, 235R, 235Y, 236D, 236N, 237D, 237N, 239D, 239E, 266M, 267D, 267E, 268D, 268E, 327D, 327E, 328F, 328W, 328Y, and 332E. Exemplary substitutions include 235Y, 236D, 239D, 266M, 267E, 268D, 268E, 328F, 328W, and 328Y. Other Fc variants for enhancing binding to FcγRIIb include 235Y/267E, 236D/267E, 239D/268D, 239D/267E, 267E/268D, 267E/268E, and 267E/328F. Specifically, the S267E, G236D, S239D, L328F and I332E variants, including the S267E+L328F double variant, of human IgG1 are of particular value in specifically enhancing affinity for the inhibitory FcγRIIb receptor. Chu et al. (2008)Mol. Immunol. 45:3926; U.S. Pat. App. Pub. 2006/024298; WO 2012/087928. Enhanced specificity for FcγRIIb (as distinguished from FcγRIIa^{R131}) may be obtained by adding the P238D substitution. Mimoto et al. (2013) Protein. Eng. Des. & Selection 26:589; WO 2012/115241.

### Glycosylation

[0275] Glycosylation of an antibody is modified to increase or decrease effector function. For example, an aglycoslated antibody can be made that lacks all effector function by mutating the conserved asparagine residue at position 297 (e.g. N297A), thus abolishing complement and FcγRI binding. Bolt et al. (1993) Eur. J. Immunol. 23:403. See also Tao & Morrison (1989) J. Immunol. 143:2595 (using N297Q in IgG1 to eliminate glycosylation at position 297).

[0276] Although aglycosylated antibodies generally lack effector function, mutations can be introduced to restore that function. Aglycosylated antibodies, e.g. those resulting from N297A/C/D/or H mutations or produced in systems (e.g. E. coli) that do not glycosylate proteins, can be further mutated to restore FcγR binding, e.g. S298G and/or T299A/G/or H (WO 2009/079242), or E382V and M428I (Jung et al. (2010) Proc. Nat'l Acad. Sci (USA) 107:604).

[0277] Additionally, an antibody with enhanced ADCC can be made by altering the glycosylation. For example, removal of fucose from heavy chain Asn297-linked oligosaccharides has been shown to enhance ADCC, based on improved binding to FcγRIIIa. Shields et al. (2002) JBC 277:26733; Niwa et al. (2005) J. Immunol. Methods 306: 151; Cardarelli et al. (2009) Clin. Cancer Res. 15:3376 (MDX-1401); Cardarelli et al. (2010) Cancer Immunol. Immunotherap. 59:257 (MDX-1342). Such low fucose antibodies may be produced, e.g., in knockout Chinese hamster ovary (CHO) cells lacking fucosyltransferase (FUT8) (Yamane-Ohnuki et al. (2004) Biotechnol. Bioeng. 87:614), or in other cells that generate afucosylated antibodies. See, e.g., Zhang et al. (2011) mAbs 3:289 and Li et al. (2006) Nat. Biotechnol. 24:210 (both describing antibody production in glycoengineered Pichia pastoris); Mossner et al. (2010) Blood 115:4393; Shields et al. (2002) J. Biol. Chem. 277:26733; Shinkawa et al. (2003) J. Biol. Chem. 278:3466; EP 1176195B1. ADCC can also be enhanced as described in PCT Publication WO 03/035835, which discloses use of a variant CHO cell line, Lec13, with reduced ability to attach fucose to Asn(297)-linked carbohydrates, also resulting in hypofucosylation of antibodies expressed in that host cell (see also Shields, R. L. et al. (2002) J. Biol. Chem. 277:26733-26740). Alternatively, fucose analogs may be added to culture medium during antibody production to inhibit incorporation of fucose into the carbohydrate on the antibody. WO 2009/135181.

[0278] Increasing bisecting GlcNac structures in antibody-linked oligosaccharides also enhances ADCC. PCT Publication WO 99/54342 by Umana et al. describes cell lines engineered to express glycoprotein-modifying glycosyl transferases (e.g., beta(1,4)-N-acetylglucosaminyltransferase III (GnTIII)) such that antibodies expressed in the engineered cell lines exhibit increased bisecting GlcNac structures which results in increased ADCC activity of the antibodies (see also Umana et al. (1999) Nat. Biotech. 17:176-180).

[0279] Additional glycosylation variants have been developed that are devoid of galactose, sialic acid, fucose and xylose residues (so-called GNGN glycoforms), which exhibit enhanced ADCC and ADCP but decreased CDC, as well as others that are devoid of sialic acid, fucose and xylose (so-called G1/G2 glycoforms), which exhibit enhanced ADCC, ADCP and CDC. U.S. Pat. App. Pub. No. 2013/0149300. Antibodies having these glycosylation patterns are optionally produced in genetically modified N. benthamiana plants in which the endogenous xylosyl and fucosyl transferase genes have been knocked-out.

[0280] Glycoengineering can also be used to modify the anti-inflammatory properties of an IgG construct by changing the a2,6 sialyl content of the carbohydrate chains attached at Asn297 of the Fc regions, wherein an increased proportion of a2,6 sialylated forms results in enhanced anti-inflammatory effects. See Nimmerjahn et al. (2008) Ann. Rev. Immunol. 26:513. Conversely, reduction in the proportion of antibodies having α2,6 sialylated carbohydrates may be useful in cases where anti-inflammatory properties are not wanted. Methods of modifying α2,6 sialylation content of antibodies, for example by selective purification of α2,6 sialylated forms or by enzymatic modification, are provided at U.S. Pat. Appl. Pub. No. 2008/0206246. In other embodiments, the amino acid sequence of the Fc region may be modified to mimic the effect of α2,6 sialylation, for example by inclusion of an F241A modification. WO 2013/095966.

[0281] Antibodies described herein can contain one or more glycosylation sites in either the light or heavy chain variable region. Such glycosylation sites may result in increased immunogenicity of the antibody or an alteration of the pK of the antibody due to altered antigen binding (Marshall et al (1972) Annu Rev Biochem 41:673-702; Gala and Morrison (2004) J. Immunol 172:5489-94; Wallick et al (1988) J Exp Med 168:1099-109; Spiro (2002) Glycobiology 12:43R-56R; Parekh et al (1985) Nature 316:452-7; Mimura et al. (2000) Mol Immunol 37:697-706). Glycosylation has been known to occur at motifs containing an N-X-S/T sequence.

### Biological Half-Life

[0282] In certain embodiments, the antibody is modified to increase its biological half-life. Various approaches are possible. For example, this may be done by increasing the binding affinity of the Fc region for FcRn. In one embodiment, the antibody is altered within the CH1 or CL region to contain a salvage receptor binding epitope taken from two loops of a CH2 domain of an Fc region of an IgG, as described in U.S. Pat. Nos. 5,869,046 and 6,121,022 by Presta et al. Other exemplary Fc variants that increase binding to FcRn and/or improve pharmacokinetic properties include substitutions at positions 259, 308, and 434, including for example 2591, 308F, 428L, 428M, 434S, 434H, 434F, 434Y, and 434M. Other variants that increase Fc binding to FcRn include: 250E, 250Q, 428L, 428F, 250Q/428L (Hinton et al., 2004, J. Biol. Chem. 279(8): 6213-6216, Hinton et al. 2006 Journal of Immunology 176:346-356), 256A, 272A, 305A, 307A, 31 1A, 312A, 378Q, 380A, 382A, 434A (Shields et al, Journal of Biological Chemistry, 2001, 276(9):6591-6604), 252F, 252Y, 252W, 254T, 256Q, 256E, 256D, 433R, 434F, 434Y, 252Y/254T/256E, 433K/434F/436H (Del′ Acqua et al. Journal of Immunology, 2002, 169:5171-5180, Dall'Acqua et al., 2006, Journal of Biological Chemistry 281:23514-23524). See U.S. Pat. No. 8,367,805.

[0283] Modification of certain conserved residues in IgG Fc (I253/H310/Q311/H433/N434), such as the N434A variant (Yeung et al. (2009) J Immunol. 182:7663), has been proposed as a way to increase FcRn affinity, thus increasing the half-life of the antibody in circulation. WO 98/023289. The combination Fc variant comprising M428L and N434S has been shown to increase FcRn binding and increase serum half-life up to five-fold. Zalevsky et al. (2010) Nat. Biotechnol. 28:157. The combination Fc variant comprising T307A, E380A and N434A modifications also extends half-life of IgG1 antibodies. Petkova et al. (2006) Int. Immunol. 18:1759. In addition, combination Fc variants comprising M252Y/M428L, M428L/N434H, M428LN434F, M428L/N434Y, M428L/N434A, M428L/N434M, and M428L/N434S variants have also been shown to extend half-life. WO 2009/086320.

[0284] Further, a combination Fc variant comprising M252Y, S254T and T256E, increases half-life-nearly 4-fold. Dall'Acqua et al. (2006) J. Biol. Chem. 281:23514. A related IgG1 modification providing increased FcRn affinity but reduced pH dependence (M252Y/S254T/T256E/H433K/N434F) has been used to create an IgG1 construct (“MST-HN Abdeg”) for use as a competitor to prevent binding of other antibodies to FcRn, resulting in increased clearance of that other antibody, either endogenous IgG (e.g. in an autoimmune setting) or another exogenous (therapeutic) mAb. Vaccaro et al. (2005) Nat. Biotechnol. 23:1283; WO 2006/130834.

[0285] Other modifications for increasing FcRn binding are described in Yeung et al. (2010) J. Immunol. 182:7663-7671; 6,277,375; 6,821,505; WO 97/34631; WO 2002/060919.

[0286] In certain embodiments, hybrid IgG isotypes may be used to increase FcRn binding, and potentially increase half-life. For example, an IgG1/IgG3 hybrid variant may be constructed by substituting IgG1 positions in the CH2 and/or CH3 region with the amino acids from IgG3 at positions where the two isotypes differ. Thus a hybrid variant IgG antibody may be constructed that comprises one or more substitutions, e.g., 274Q, 276K, 300F, 339T, 356E, 358M, 384S, 392N, 397M, 422I, 435R, and 436F. In other embodiments described herein, an IgG1/IgG2 hybrid variant may be constructed by substituting IgG2 positions in the CH2 and/or CH3 region with amino acids from IgG1 at positions where the two isotypes differ. Thus a hybrid variant IgG antibody may be constructed that comprises one or more substitutions, e.g., one or more of the following amino acid substitutions: 233E, 234L, 235L, -236G (referring to an insertion of a glycine at position 236), and 327A. See U.S. Pat. No. 8,629,113. A hybrid of IgG1/IgG2/IgG4 sequences has been generated that purportedly increases serum half-life and improves expression. U.S. Pat. No. 7,867,491 (sequence number 18 therein).

[0287] The serum half-life of the antibodies of the present invention can also be increased by pegylation. An antibody can be pegylated to, for example, increase the biological (e.g., serum) half-life of the antibody. To pegylate an antibody, the antibody, or fragment thereof, typically is reacted with a polyethylene glycol (PEG) reagent, such as a reactive ester or aldehyde derivative of PEG, under conditions in which one or more PEG groups become attached to the antibody or antibody fragment. Preferably, the pegylation is carried out via an acylation reaction or an alkylation reaction with a reactive PEG molecule (or an analogous reactive water-soluble polymer). As used herein, the term “polyethylene glycol” is intended to encompass any of the forms of PEG that have been used to derivatize other proteins, such as mono (C1-C10) alkoxy- or aryloxy-polyethylene glycol or polyethylene glycol-maleimide. In certain embodiments, the antibody to be pegylated is an aglycosylated antibody. Methods for pegylating proteins are known in the art and can be applied to the antibodies described herein. See for example, EP 0154316 by Nishimura et al. and EP 0401384 by Ishikawa et al.

[0288] Alternatively, under some circumstances it may be desirable to decrease the half-life of an antibody of the present invention, rather than increase it. Modifications such as I253A (Hornick et al. (2000) J. Nucl. Med. 41:355) and H435A/R I253A or H310A (Kim et al. (2000) Eur. J. Immunol. 29:2819) in Fc of human IgG1 can decrease FcRn binding, thus decreasing half-life (increasing clearance) for use in situations where rapid clearance is preferred, such a medical imaging. See also Kenanova et al. (2005) Cancer Res. 65:622. Other means to enhance clearance include formatting the antigen binding domains of the present invention as antibody fragments lacking the ability to bind FcRn, such as Fab fragments. Such modification can reduce the circulating half-life of an antibody from a couple of weeks to a matter of hours. Selective PEGylation of antibody fragments can then be used to fine-tune (increase) the half-life of the antibody fragments if necessary. Chapman et al. (1999) Nat. Biotechnol. 17:780. Antibody fragments may also be fused to human serum albumin, e.g. in a fusion protein construct, to increase half-life. Yeh et al. (1992) Proc. Nat'l Acad. Sci. 89:1904. Alternatively, a bispecific antibody may be constructed with a first antigen binding domain of the present invention and a second antigen binding domain that binds to human serum albumin (HSA). See Int'l Pat. Appl. Pub. WO 2009/127691 and patent references cited therein. Alternatively, specialized polypeptide sequences can be added to antibody fragments to increase half-life, e.g. “XTEN” polypeptide sequences. Schellenberger et al. (2009) Nat. Biotechnol. 27:1186; Intl Pat. Appl. Pub. WO 2010/091122.

### Stability

[0289] A potential protease cleavage site in the hinge of IgG1 constructs can be eliminated by D221G and K222S modifications, increasing the stability of the antibody. WO 2014/043344.

[0290] In certain embodiments, the antibodies described herein do not contain asparagine isomerism sites. The deamidation of asparagine may occur on N-G or D-G sequences and may result in the creation of an isoaspartic acid residue that may introduce a kink into the polypeptide chain and may decrease its stability (isoaspartic acid effect).

[0291] Each antibody will have a unique isoelectric point (pI), which generally falls in the pH range between 6 and 9.5. The pI for an IgG1 antibody typically falls within the pH range of 7-9.5 and the pI for an IgG4 antibody typically falls within the pH range of 6-8. There is speculation that antibodies with a pI outside the normal range may have some unfolding and instability under in vivo conditions. Thus, it is preferred to have an antibody that contains a pI value that falls in the normal range. This can be achieved either by selecting antibodies with a pI in the normal range or by mutating charged surface residues.

[0292] Each antibody will have a characteristic melting temperature, with a higher melting temperature indicating greater overall stability in vivo (Krishnamurthy R and Manning M C (2002) Curr Pharm Biotechnol 3:361-71). Generally, it is preferred that the T_{M1} (the temperature of initial unfolding) be greater than 60° C., preferably greater than 65° C., even more preferably greater than 70° C. The melting point of an antibody can be measured using differential scanning calorimetry (Chen et al (2003) Pharm Res 20:1952-60; Ghirlando et al (1999) Immunol Lett 68:47-52) or circular dichroism (Murray et al. (2002) J. Chromatogr Sci 40:343-9).

[0293] In a preferred embodiment, antibodies are selected that do not degrade rapidly. Degradation of an antibody can be measured using capillary electrophoresis (CE) and MALDI-MS (Alexander A J and Hughes D E (1995) Anal Chem 67:3626-32).

[0294] When using an IgG4 constant domain, it is usually preferable to include the substitution S228P, which mimics the hinge sequence in IgG1 and thereby stabilizes IgG4 molecules, e.g. reducing Fab-arm exchange between the therapeutic antibody and endogenous IgG4 in the patient being treated. Labrijn et al. (2009) Nat. Biotechnol. 27:767; Reddy et al. (2000) J Immunol. 164:1925. Similarly, in IgG2 hinge containing antibodies a C219S and/or C220S mutation stabilizes the antibody comprising an IgG2 hinge.

### Aggregation

[0295] In another preferred embodiment, antibodies are selected that have minimal aggregation effects, which can lead to the triggering of an unwanted immune response and/or altered or unfavorable pharmacokinetic properties. Generally, antibodies are acceptable with aggregation of 25% or less, preferably 20% or less, even more preferably 15% or less, even more preferably 10% or less and even more preferably 5% or less. Aggregation can be measured by several techniques, including size-exclusion column (SEC), high performance liquid chromatography (HPLC), and light scattering.

### V. Non-Antibody Proteins and Antibody Derivatives

[0296] The invention described herein may also be applied to molecules that are not full length antibodies, provided that they comprise a hinge. For example, IgG fusion proteins with an enhanced biologic activity or lack of effector function may be made. Accordingly, provided herein are fusion proteins comprising an active moiety linked, e.g., covalently linked, to an IgG constant region, e.g., an Fc region, comprising an IgG2 hinge and optionally a CH2 and CH3 domains or portions thereof, or linked to an IgG (e.g., an IgG1) or portion thereof with reduced effector function, e.g., comprising a mutation at P238, e.g., P238K. The Fc may be any Fc of a modified heavy chain constant region described herein, such as the Fc portions of the modified heavy chain constant regions set forth in Tables 5, 6 or in the Sequence Table.

[0297] Antibodies described herein may also be used for forming bispecific molecules or molecules for CAR-T therapy. An antibody, or antigen-binding portions thereof, can be derivatized or linked to another functional molecule, e.g., another peptide or protein (e.g., another antibody or ligand for a receptor) to generate a bispecific molecule that binds to at least two different binding sites or target molecules. Antibodies described herein may be derivatized or linked to more than one other functional molecule to generate multispecific molecules that bind to more than two different binding sites and/or target molecules; such multispecific molecules are also intended to be encompassed by the term “bispecific molecule” as used herein. To create a bispecific molecule, an antibody described herein can be functionally linked (e.g., by chemical coupling, genetic fusion, noncovalent association or otherwise) to one or more other binding molecules, such as another antibody, antibody fragment, peptide or binding mimetic, such that a bispecific molecule results.

### VI. Compositions

[0298] Further provided are compositions, e.g., a pharmaceutical compositions, containing one or a combination of antibodies, or antigen-binding portion(s) thereof, described herein, formulated together with a pharmaceutically acceptable carrier. Such compositions may include one or a combination of (e.g., two or more different) antibodies, or immunoconjugates or bispecific molecules described herein. For example, a pharmaceutical composition described herein can comprise a combination of antibodies (or immunoconjugates or bispecifics) that bind to different epitopes on the target antigen or that have complementary activities.

[0299] In certain embodiments, a composition comprises an antibody described herein at a concentration of at least 1 mg/ml, 5 mg/ml, 10 mg/ml, 50 mg/ml, 100 mg/ml, 150 mg/ml, 200 mg/ml, 1-300 mg/ml, or 100-300 mg/ml.

[0300] Pharmaceutical compositions described herein also can be administered in combination therapy, i.e., combined with other agents. For example, the combination therapy can include an antibody described herein combined with at least one other anti-cancer and/or T-cell stimulating (e.g., activating) agent. Examples of therapeutic agents that can be used in combination therapy are described in greater detail below in the section on uses of the antibodies described herein.

[0301] In some embodiments, therapeutic compositions disclosed herein can include other compounds, drugs, and/or agents used for the treatment of cancer. Such compounds, drugs, and/or agents can include, for example, chemotherapy drugs, small molecule drugs or antibodies that stimulate the immune response to a given cancer. In some instances, therapeutic compositions can include, for example, one or more of an anti-CTLA-4 antibody, an anti-PD-1 antibody, an anti-PDL-1 antibody, an anti-OX40 (also known as CD134, TNFRSF4, ACT35 and/or TXGP1L) antibody, or an anti-LAG-3 antibody.

[0302] As used herein, “pharmaceutically acceptable carrier” includes any and all solvents, dispersion media, coatings, antibacterial and antifungal agents, isotonic and absorption delaying agents, and the like that are physiologically compatible. Preferably, the carrier is suitable for intravenous, intramuscular, subcutaneous, parenteral, spinal or epidermal administration (e.g., by injection or infusion). Depending on the route of administration, the active compound, i.e., antibody, immunoconjugate, or bispecific molecule, may be coated in a material to protect the compound from the action of acids and other natural conditions that may inactivate the compound.

[0303] The pharmaceutical compounds described herein may include one or more pharmaceutically acceptable salts. A “pharmaceutically acceptable salt” refers to a salt that retains the desired biological activity of the parent compound and does not impart any undesired toxicological effects (see e.g., Berge, S. M., et al. (1977)J Pharm. Sci. 66:1-19). Examples of such salts include acid addition salts and base addition salts. Acid addition salts include those derived from nontoxic inorganic acids, such as hydrochloric, nitric, phosphoric, sulfuric, hydrobromic, hydroiodic, phosphorous and the like, as well as from nontoxic organic acids such as aliphatic mono- and dicarboxylic acids, phenyl-substituted alkanoic acids, hydroxy alkanoic acids, aromatic acids, aliphatic and aromatic sulfonic acids and the like. Base addition salts include those derived from alkaline earth metals, such as sodium, potassium, magnesium, calcium and the like, as well as from nontoxic organic amines, such as N,N′-dibenzylethylenediamine, N-methylglucamine, chloroprocaine, choline, diethanolamine, ethylenediamine, procaine and the like.

[0304] A pharmaceutical composition described herein also may include a pharmaceutically acceptable anti-oxidant. Examples of pharmaceutically acceptable antioxidants include: (1) water soluble antioxidants, such as ascorbic acid, cysteine hydrochloride, sodium bisulfate, sodium metabisulfite, sodium sulfite and the like; (2) oil-soluble antioxidants, such as ascorbyl palmitate, butylated hydroxyanisole (BHA), butylated hydroxytoluene (BHT), lecithin, propyl gallate, alpha-tocopherol, and the like; and (3) metal chelating agents, such as citric acid, ethylenediamine tetraacetic acid (EDTA), sorbitol, tartaric acid, phosphoric acid, and the like.

[0305] Examples of suitable aqueous and nonaqueous carriers that may be employed in the pharmaceutical compositions described herein include water, ethanol, polyols (such as glycerol, propylene glycol, polyethylene glycol, and the like), and suitable mixtures thereof, vegetable oils, such as olive oil, and injectable organic esters, such as ethyl oleate. Proper fluidity can be maintained, for example, by the use of coating materials, such as lecithin, by the maintenance of the required particle size in the case of dispersions, and by the use of surfactants.

[0306] These compositions may also contain adjuvants such as preservatives, wetting agents, emulsifying agents and dispersing agents. Prevention of presence of microorganisms may be ensured both by sterilization procedures, supra, and by the inclusion of various antibacterial and antifungal agents, for example, paraben, chlorobutanol, phenol sorbic acid, and the like. It may also be desirable to include isotonic agents, such as sugars, sodium chloride, and the like into the compositions. In addition, prolonged absorption of the injectable pharmaceutical form may be brought about by the inclusion of agents which delay absorption such as aluminum monostearate and gelatin.

[0307] Pharmaceutically acceptable carriers include sterile aqueous solutions or dispersions and sterile powders for the extemporaneous preparation of sterile injectable solutions or dispersion. The use of such media and agents for pharmaceutically active substances is known in the art. Except insofar as any conventional media or agent is incompatible with the active compound, use thereof in the pharmaceutical compositions described herein is contemplated. Supplementary active compounds can also be incorporated into the compositions.

[0308] Therapeutic compositions typically must be sterile and stable under the conditions of manufacture and storage. The composition can be formulated as a solution, microemulsion, liposome, or other ordered structure suitable to high drug concentration. The carrier can be a solvent or dispersion medium containing, for example, water, ethanol, polyol (for example, glycerol, propylene glycol, and liquid polyethylene glycol, and the like), and suitable mixtures thereof. The proper fluidity can be maintained, for example, by the use of a coating such as lecithin, by the maintenance of the required particle size in the case of dispersion and by the use of surfactants. In many cases, it will be preferable to include isotonic agents, for example, sugars, polyalcohols such as mannitol, sorbitol, or sodium chloride in the composition. Prolonged absorption of the injectable compositions can be brought about by including in the composition an agent that delays absorption, for example, monostearate salts and gelatin.

[0309] Sterile injectable solutions can be prepared by incorporating the active compound in the required amount in an appropriate solvent with one or a combination of ingredients enumerated above, as required, followed by sterilization microfiltration. Generally, dispersions are prepared by incorporating the active compound into a sterile vehicle that contains a basic dispersion medium and the required other ingredients from those enumerated above. In the case of sterile powders for the preparation of sterile injectable solutions, the preferred methods of preparation are vacuum drying and freeze-drying (lyophilization) that yield a powder of the active ingredient plus any additional desired ingredient from a previously sterile-filtered solution thereof.

[0310] The amount of active ingredient which can be combined with a carrier material to produce a single dosage form will vary depending upon the subject being treated, and the particular mode of administration. The amount of active ingredient which can be combined with a carrier material to produce a single dosage form will generally be that amount of the composition which produces a therapeutic effect. Generally, out of one hundred percent, this amount will range from about 0.01 percent to about ninety-nine percent of active ingredient, preferably from about 0.1 percent to about 70 percent, most preferably from about 1 percent to about 30 percent of active ingredient in combination with a pharmaceutically acceptable carrier.

[0311] Dosage regimens are adjusted to provide the optimum desired response (e.g., a therapeutic response). For example, a single bolus may be administered, several divided doses may be administered over time or the dose may be proportionally reduced or increased as indicated by the exigencies of the therapeutic situation. It is especially advantageous to formulate parenteral compositions in dosage unit form for ease of administration and uniformity of dosage. Dosage unit form as used herein refers to physically discrete units suited as unitary dosages for the subjects to be treated; each unit contains a predetermined quantity of active compound calculated to produce the desired therapeutic effect in association with the required pharmaceutical carrier. The specification for the dosage unit forms described herein are dictated by and directly dependent on (a) the unique characteristics of the active compound and the particular therapeutic effect to be achieved, and (b) the limitations inherent in the art of compounding such an active compound for the treatment of sensitivity in individuals.

[0312] For administration of the antibody, the dosage ranges from about 0.0001 to 100 mg/kg, and more usually 0.01 to 5 mg/kg, of the host body weight. For example dosages can be 0.3 mg/kg body weight, 1 mg/kg body weight, 3 mg/kg body weight, 5 mg/kg body weight or 10 mg/kg body weight or within the range of 1-10 mg/kg. An exemplary treatment regime entails administration once per week, once every two weeks, once every three weeks, once every four weeks, once a month, once every 3 months or once every three to 6 months. Preferred dosage regimens for an antibody described herein include 1 mg/kg body weight or 3 mg/kg body weight via intravenous administration, with the antibody being given using one of the following dosing schedules: (i) every four weeks for six dosages, then every three months; (ii) every three weeks; (iii) 3 mg/kg body weight once followed by 1 mg/kg body weight every three weeks.

[0313] In some methods, two or more monoclonal antibodies with different binding specificities are administered simultaneously, in which case the dosage of each antibody administered falls within the ranges indicated. Antibody is usually administered on multiple occasions. Intervals between single dosages can be, for example, weekly, monthly, every three months or yearly. Intervals can also be irregular as indicated by measuring blood levels of antibody to the target antigen in the patient. In some methods, dosage is adjusted to achieve a plasma antibody concentration of about 1-1000 μg/ml and in some methods about 25-300 μg/ml.

[0314] An antibody can be administered as a sustained release formulation, in which case less frequent administration is required. Dosage and frequency vary depending on the half-life of the antibody in the patient. In general, human antibodies show the longest half-life, followed by humanized antibodies, chimeric antibodies, and nonhuman antibodies. The dosage and frequency of administration can vary depending on whether the treatment is prophylactic or therapeutic. In prophylactic applications, a relatively low dosage is administered at relatively infrequent intervals over a long period of time. Some patients continue to receive treatment for the rest of their lives. In therapeutic applications, a relatively high dosage at relatively short intervals is sometimes required until progression of the disease is reduced or terminated, and preferably until the patient shows partial or complete amelioration of symptoms of disease. Thereafter, the patient can be administered a prophylactic regime.

[0315] Actual dosage levels of the active ingredients in the pharmaceutical compositions described herein may be varied so as to obtain an amount of the active ingredient which is effective to achieve the desired therapeutic response for a particular patient, composition, and mode of administration, without being toxic to the patient. The selected dosage level will depend upon a variety of pharmacokinetic factors including the activity of the particular compositions described herein employed, or the ester, salt or amide thereof, the route of administration, the time of administration, the rate of excretion of the particular compound being employed, the duration of the treatment, other drugs, compounds and/or materials used in combination with the particular compositions employed, the age, sex, weight, condition, general health and prior medical history of the patient being treated, and like factors well known in the medical arts.

[0316] A “therapeutically effective dosage” of an antibody described herein preferably results in a decrease in severity of disease symptoms, an increase in frequency and duration of disease symptom-free periods, or a prevention of impairment or disability due to the disease affliction. In the context of cancer, a therapeutically effective dose preferably prevents further deterioration of physical symptoms associated with cancer. Symptoms of cancer are well-known in the art and include, for example, unusual mole features, a change in the appearance of a mole, including asymmetry, border, color and/or diameter, a newly pigmented skin area, an abnormal mole, darkened area under nail, breast lumps, nipple changes, breast cysts, breast pain, death, weight loss, weakness, excessive fatigue, difficulty eating, loss of appetite, chronic cough, worsening breathlessness, coughing up blood, blood in the urine, blood in stool, nausea, vomiting, liver metastases, lung metastases, bone metastases, abdominal fullness, bloating, fluid in peritoneal cavity, vaginal bleeding, constipation, abdominal distension, perforation of colon, acute peritonitis (infection, fever, pain), pain, vomiting blood, heavy sweating, fever, high blood pressure, anemia, diarrhea, jaundice, dizziness, chills, muscle spasms, colon metastases, lung metastases, bladder metastases, liver metastases, bone metastases, kidney metastases, and pancreatic metastases, difficulty swallowing, and the like.

[0317] A therapeutically effective dose may prevent or delay onset of cancer, such as may be desired when early or preliminary signs of the disease are present. Laboratory tests utilized in the diagnosis of cancer include chemistries, hematology, serology and radiology. Accordingly, any clinical or biochemical assay that monitors any of the foregoing may be used to determine whether a particular treatment is a therapeutically effective dose for treating cancer. One of ordinary skill in the art would be able to determine such amounts based on such factors as the subject's size, the severity of the subject's symptoms, and the particular composition or route of administration selected.

[0318] A composition described herein can be administered via one or more routes of administration using one or more of a variety of methods known in the art. As will be appreciated by the skilled artisan, the route and/or mode of administration will vary depending upon the desired results. Preferred routes of administration for antibodies described herein include intravenous, intramuscular, intradermal, intraperitoneal, subcutaneous, spinal or other parenteral routes of administration, for example by injection or infusion. The phrase “parenteral administration” as used herein means modes of administration other than enteral and topical administration, usually by injection, and includes, without limitation, intravenous, intramuscular, intraarterial, intrathecal, intracapsular, intraorbital, intracardiac, intradermal, intraperitoneal, transtracheal, subcutaneous, subcuticular, intraarticular, subcapsular, subarachnoid, intraspinal, epidural and intrasternal injection and infusion.

[0319] Alternatively, an antibody described herein can be administered via a non-parenteral route, such as a topical, epidermal or mucosal route of administration, for example, intranasally, orally, vaginally, rectally, sublingually or topically.

[0320] The active compounds can be prepared with carriers that will protect the compound against rapid release, such as a controlled release formulation, including implants, transdermal patches, and microencapsulated delivery systems. Biodegradable, biocompatible polymers can be used, such as ethylene vinyl acetate, polyanhydrides, polyglycolic acid, collagen, polyorthoesters, and polylactic acid. Many methods for the preparation of such formulations are patented or generally known to those skilled in the art. See, e.g., Sustained and Controlled Release Drug Delivery Systems, J. R. Robinson, ed., Marcel Dekker, Inc., New York, 1978.

[0321] Therapeutic compositions can be administered with medical devices known in the art. For example, in a preferred embodiment, a therapeutic composition described herein can be administered with a needleless hypodermic injection device, such as the devices disclosed in U.S. Pat. Nos. 5,399,163; 5,383,851; 5,312,335; 5,064,413; 4,941,880; 4,790,824; or 4,596,556. Examples of well-known implants and modules for use with antibodies described herein include: U.S. Pat. No. 4,487,603, which discloses an implantable micro-infusion pump for dispensing medication at a controlled rate; U.S. Pat. No. 4,486,194, which discloses a therapeutic device for administering medicants through the skin; U.S. Pat. No. 4,447,233, which discloses a medication infusion pump for delivering medication at a precise infusion rate; U.S. Pat. No. 4,447,224, which discloses a variable flow implantable infusion apparatus for continuous drug delivery; U.S. Pat. No. 4,439,196, which discloses an osmotic drug delivery system having multi-chamber compartments; and U.S. Pat. No. 4,475,196, which discloses an osmotic drug delivery system. These patents are incorporated herein by reference. Many other such implants, delivery systems, and modules are known to those skilled in the art.

[0322] In certain embodiments, the antibodies described herein can be formulated to ensure proper distribution in vivo. For example, the blood-brain barrier (BBB) excludes many highly hydrophilic compounds. To ensure that the therapeutic compounds described herein cross the BBB (if desired), they can be formulated, for example, in liposomes. For methods of manufacturing liposomes, see, e.g., U.S. Pat. Nos. 4,522,811; 5,374,548; and 5,399,331. The liposomes may comprise one or more moieties which are selectively transported into specific cells or organs, thus enhance targeted drug delivery (see, e.g., V. V. Ranade (1989) J. Clin. Pharmacol. 29:685). Exemplary targeting moieties include folate or biotin (see, e.g., U.S. Pat. No. 5,416,016 to Low et al.); mannosides (Umezawa et al., (1988) Biochem. Biophys. Res. Commun. 153:1038); antibodies (P. G. Bloeman et al. (1995) FEBS Lett. 357:140; M. Owais et al. (1995) Antimicrob. Agents Chemother. 39:180); surfactant protein A receptor (Briscoe et al. (1995)Am. J. Physiol. 1233:134); p120 (Schreier et al. (1994) J. Biol. Chem. 269:9090); see also K. Keinanen; M. L. Laukkanen (1994) FEBS Lett. 346:123; J. J. Killion; I. J. Fidler (1994) Immunomethods 4:273.

### VII. Uses and Methods

[0323] The antibodies, antibody compositions and methods described herein have numerous in vitro and in vivo utilities involving, for example, the treatment of various disorders, e.g., cancers. For example, antibodies described herein can be administered to cells in culture, in vitro or ex vivo, or to human subjects, e.g., in vivo. Accordingly, provided herein are methods of treatment of a subject comprising administering to the subject an antibody comprising a modified heavy chain constant region, such that treatment occurs. Also provided herein are methods of modifying an immune response in a subject comprising administering to the subject an antibody such that the immune response in the subject is modified. Preferably, the response is enhanced, stimulated or up-regulated. However, in other embodiments, an immune response is inhibited.

[0324] Preferred subjects include human patients in whom enhancement of an immune response would be desirable. The methods are particularly suitable for treating human patients having a disorder that can be treated by augmenting an immune response (e.g., the T-cell mediated immune response). In a particular embodiment, the methods are particularly suitable for treatment of cancer in vivo. In one embodiment, the subject is a tumor-bearing subject and an immune response against the tumor is stimulated. A tumor may be a solid tumor or a liquid tumor, e.g., a hematological malignancy. In certain embodiments, a tumor is an immunogenic tumor. In certain embodiments, a tumor is non-immunogenic. In certain embodiments, a tumor is PD-L1 positive. In certain embodiments a tumor is PD-L1 negative. A subject may also be a virus-bearing subject and an immune response against the virus is stimulated.

[0325] Further provided are methods for inhibiting growth of tumor cells in a subject comprising administering to the subject an antibody described herein such that growth of the tumor is inhibited in the subject. Also provided are methods of treating viral infection in a subject comprising administering to the subject an antibody described herein such that the viral infection is treated in the subject.

[0326] Also encompassed herein are methods for depleting Treg cells from the tumor microenvironment of a subject having a tumor, e.g., cancerous tumor, comprising administering to the subject a therapeutically effective amount of an antibody described herein that comprises an Fc that stimulates depletion of T_{reg} cells in the tumor microenvironment. An Fc may, e.g., be an Fc with effector function or enhanced effector function, such as binding or having enhanced binding to one or more activating Fc receptors.

[0327] In certain embodiments, an antibody comprising a modified heavy chain constant region binds to a stimulatory molecule and inhibits its activity, i.e., is an antagonist of a stimulatory molecule, or the antibody binds to an inhibitory molecule and stimulates its activity, i.e., is an agonist of an inhibitory molecule. Such antibodies may be used for treating disease in which the immune system or an immune response should be downregulated, e.g., autoimmune diseases or to prevent transplant rejections.

### Cancer

[0328] Provided herein are methods for treating a subject having cancer, comprising administering to the subject antibody described herein, such that the subject is treated, e.g., such that growth of cancerous tumors is inhibited or reduced and/or that the tumors regress. For example, activation of GITR by anti-GITR antibodies can enhance the immune response to cancerous cells in the patient. The antibody can be used alone to inhibit the growth of cancerous tumors. Alternatively, the antibody can be used in conjunction with another agent, e.g., other immunogenic agents, standard cancer treatments, or other antibodies, as described below.

[0329] Cancers whose growth may be inhibited using the antibodies described herein include cancers typically responsive to immunotherapy. Non-limiting examples of cancers for treatment include squamous cell carcinoma, small-cell lung cancer, non-small cell lung cancer, squamous non-small cell lung cancer (NSCLC), non NSCLC, glioma, gastrointestinal cancer, renal cancer (e.g. clear cell carcinoma), ovarian cancer, liver cancer, colorectal cancer, endometrial cancer, kidney cancer (e.g., renal cell carcinoma (RCC)), prostate cancer (e.g. hormone refractory prostate adenocarcinoma), thyroid cancer, neuroblastoma, pancreatic cancer, glioblastoma (glioblastoma multiforme), cervical cancer, stomach cancer, bladder cancer, hepatoma, breast cancer, colon carcinoma, and head and neck cancer (or carcinoma), gastric cancer, germ cell tumor, pediatric sarcoma, sinonasal natural killer, melanoma (e.g., metastatic malignant melanoma, such as cutaneous or intraocular malignant melanoma), bone cancer, skin cancer, uterine cancer, cancer of the anal region, testicular cancer, carcinoma of the fallopian tubes, carcinoma of the endometrium, carcinoma of the cervix, carcinoma of the vagina, carcinoma of the vulva, cancer of the esophagus, cancer of the small intestine, cancer of the endocrine system, cancer of the parathyroid gland, cancer of the adrenal gland, sarcoma of soft tissue, cancer of the urethra, cancer of the penis, solid tumors of childhood, cancer of the ureter, carcinoma of the renal pelvis, neoplasm of the central nervous system (CNS), primary CNS lymphoma, tumor angiogenesis, spinal axis tumor, brain stem glioma, pituitary adenoma, Kaposi's sarcoma, epidermoid cancer, squamous cell cancer, T-cell lymphoma, environmentally-induced cancers including those induced by asbestos, virus-related cancers (e.g., human papilloma virus (HPV)-related tumor), and hematologic malignancies derived from either of the two major blood cell lineages, i.e., the myeloid cell line (which produces granulocytes, erythrocytes, thrombocytes, macrophages and mast cells) or lymphoid cell line (which produces B, T, NK and plasma cells), such as all types of luekemias, lymphomas, and myelomas, e.g., acute, chronic, lymphocytic and/or myelogenous leukemias, such as acute leukemia (ALL), acute myelogenous leukemia (AML), chronic lymphocytic leukemia (CLL), and chronic myelogenous leukemia (CML), undifferentiated AML (M0), myeloblastic leukemia (M1), myeloblastic leukemia (M2; with cell maturation), promyelocytic leukemia (M3 or M3 variant [M3V]), myelomonocytic leukemia (M4 or M4 variant with eosinophilia [M4E]), monocytic leukemia (M5), erythroleukemia (M6), megakaryoblastic leukemia (M7), isolated granulocytic sarcoma, and chloroma; lymphomas, such as Hodgkin's lymphoma (HL), non-Hodgkin's lymphoma (NHL), B-cell lymphomas, T-cell lymphomas, lymphoplasmacytoid lymphoma, monocytoid B-cell lymphoma, mucosa-associated lymphoid tissue (MALT) lymphoma, anaplastic (e.g., Ki 1+) large-cell lymphoma, adult T-cell lymphoma/leukemia, mantle cell lymphoma, angio immunoblastic T-cell lymphoma, angiocentric lymphoma, intestinal T-cell lymphoma, primary mediastinal B-cell lymphoma, precursor T-lymphoblastic lymphoma, T-lymphoblastic; and lymphoma/leukaemia (T-Lbly/T-ALL), peripheral T-cell lymphoma, lymphoblastic lymphoma, post-transplantation lymphoproliferative disorder, true histiocytic lymphoma, primary central nervous system lymphoma, primary effusion lymphoma, lymphoblastic lymphoma (LBL), hematopoietic tumors of lymphoid lineage, acute lymphoblastic leukemia, diffuse large B-cell lymphoma, Burkitt's lymphoma, follicular lymphoma, diffuse histiocytic lymphoma (DHL), immunoblastic large cell lymphoma, precursor B-lymphoblastic lymphoma, cutaneous T-cell lymphoma (CTLC) (also called mycosis fungoides or Sezary syndrome), and lymphoplasmacytoid lymphoma (LPL) with Waldenstrom's macroglobulinemia; myelomas, such as IgG myeloma, light chain myeloma, nonsecretory myeloma, smoldering myeloma (also called indolent myeloma), solitary plasmocytoma, and multiple myelomas, chronic lymphocytic leukemia (CLL), hairy cell lymphoma; hematopoietic tumors of myeloid lineage, tumors of mesenchymal origin, including fibrosarcoma and rhabdomyoscarcoma; seminoma, teratocarcinoma, tumors of the central and peripheral nervous, including astrocytoma, schwannomas; tumors of mesenchymal origin, including fibrosarcoma, rhabdomyoscaroma, and osteosarcoma; and other tumors, including melanoma, xeroderma pigmentosum, keratoacanthoma, seminoma, thyroid follicular cancer and teratocarcinoma, hematopoietic tumors of lymphoid lineage, for example T-cell and B-cell tumors, including but not limited to T-cell disorders such as T-prolymphocytic leukemia (T-PLL), including of the small cell and cerebriform cell type; large granular lymphocyte leukemia (LGL) preferably of the T-cell type; a/d T-NHL hepatosplenic lymphoma; peripheral/post-thymic T cell lymphoma (pleomorphic and immunoblastic subtypes); angiocentric (nasal) T-cell lymphoma; cancer of the head or neck, renal cancer, rectal cancer, cancer of the thyroid gland; acute myeloid lymphoma, as well as any combinations of said cancers. The methods described herein may also be used for treatment of metastatic cancers, refractory cancers (e.g., cancers refractory to previous immunotherapy, e.g., with a blocking CTLA-4 or PD-1 antibody), and recurrent cancers.

### Combination Therapies

[0330] In addition to the therapies provided above, the antibodies described herein can also be used in combination with another therapy. For example, for cancer treatment, an antibody described herein may be administered to a subject who is also receiving another cancer treatment, such as chemotherapy, radiation, surgery or gene therapy.

[0331] Methods of treatment may include coadministration of an antibody described herein (e.g., an antagonist antibody, agonist antibody, and ADC having a modified heavy chain constant region) with another molecule, e.g., antibody (e.g., an antagonist antibody, agonist antibody, and ADC). An antibody described herein that stimulates the immune system may be administered with another molecule that stimulates the immune system, e.g., a molecule that is an agonist of a co-stimulatory molecule or an inhibitor of an inhibitory molecule.

[0332] An antibody as described herein alone or with one or more additional immune stimulating antibodies (e.g., CTLA-4 and/or PD-1 and/or PD-L1 and/or LAG-3 blockade) can be combined with standard cancer treatments. For example, an antibody described herein alone or with one or more additional antibodies can be effectively combined with chemotherapeutic regimes. In these instances, it may be possible to reduce the dose of other chemotherapeutic reagent administered with the combination of the instant disclosure (Mokyr et al. (1998) Cancer Research 58: 5301-5304). An example of such a combination is a combination of an antibody described herein, with or without and an additional antibody, further in combination with decarbazine or IL-2 for the treatment of melanoma.

[0333] An antibody described herein may be combined with an anti-neoplastic antibody, such as Rituxan® (rituximab), Herceptin® (trastuzumab), Bexxar® (tositumomab), Zevalin® (ibritumomab), Campath® (alemtuzumab), Lymphocide® (eprtuzumab), Avastin® (bevacizumab), and Tarceva® (erlotinib), and the like. Antibodies described herein may also be combined with one or more of the following chemotherapeutic agents: camptothecin (CPT-11), 5-fluorouracil (5-FU), cisplatin, doxorubicin, irinotecan, paclitaxel, gemcitabine, cisplatin, paclitaxel, carboplatin-paclitaxel (Taxol), doxorubicin, 5-fu, or camptothecin+apo21/TRAIL (a 6× combo)); a proteasome inhibitor (e.g., bortezomib or MG132); a Bcl-2 inhibitor (e.g., BH3I-2′ (bcl-xl inhibitor), indoleamine dioxygenase-1 (IDO1) inhibitor (e.g., INCB24360), AT-101 (R-(−)-gossypol derivative), ABT-263 (small molecule), GX-15-070 (obatoclax), or MCL-1 (myeloid leukemia cell differentiation protein-1) antagonists), iAP (inhibitor of apoptosis protein) antagonists (e.g., smac7, smac4, small molecule smac mimetic, synthetic smac peptides (see Fulda et al., Nat Med 2002; 8:808-15), ISIS23722 (LY2181308), or AEG-35156 (GEM-640)), HDAC (histone deacetylase) inhibitors, anti-CD20 antibodies (e.g., rituximab), angiogenesis inhibitors (e.g., bevacizumab), anti-angiogenic agents targeting VEGF and VEGFR (e.g., Avastin), synthetic triterpenoids (see Hyer et al., Cancer Research 2005; 65:4799-808), c-FLIP (cellular FLICE-inhibitory protein) modulators (e.g., natural and synthetic ligands of PPARγ (peroxisome proliferator-activated receptor γ), 5809354 or 5569100), kinase inhibitors (e.g., Sorafenib), Trastuzumab, Cetuximab, Temsirolimus, mTOR inhibitors such as rapamycin and temsirolimus, Bortezomib, JAK2 inhibitors, HSP90 inhibitors, PI3K-AKT inhibitors, Lenalildomide, GSK3β inhibitors, IAP inhibitors and/or genotoxic drugs.

[0334] The antibodies and combination antibody therapies described herein can further be used in combination with one or more anti-proliferative cytotoxic agents. Classes of compounds that may be used as anti-proliferative cytotoxic agents include, but are not limited to, the following:

[0335] Alkylating agents (including, without limitation, nitrogen mustards, ethylenimine derivatives, alkyl sulfonates, nitrosoureas and triazenes): Uracil mustard, Chlormethine, Cyclophosphamide (CYTOXAN™) fosfamide, Melphalan, Chlorambucil, Pipobroman, Triethylenemelamine, Triethylenethiophosphoramine, Busulfan, Carmustine, Lomustine, Streptozocin, Dacarbazine, and Temozolomide.

[0336] Antimetabolites (including, without limitation, folic acid antagonists, pyrimidine analogs, purine analogs and adenosine deaminase inhibitors): Methotrexate, 5-Fluorouracil, Floxuridine, Cytarabine, 6-Mercaptopurine, 6-Thioguanine, Fludarabine phosphate, Pentostatine, and Gemcitabine.

[0337] Suitable anti-proliferative agents for combining with antibodies described herein, without limitation, taxanes, paclitaxel (paclitaxel is commercially available as TAXOL′), docetaxel, discodermolide (DDM), dictyostatin (DCT), Peloruside A, epothilones, epothilone A, epothilone B, epothilone C, epothilone D, epothilone E, epothilone F, furanoepothilone D, desoxyepothilone B1, [17]-dehydrodesoxyepothilone B, [18]dehydrodesoxyepothilones B, C12,13-cyclopropyl-epothilone A, C6-C8 bridged epothilone A, trans-9,10-dehydroepothilone D, cis-9,10-dehydroepothilone D, 16-desmethylepothilone B, epothilone B10, discoderomolide, patupilone (EPO-906), KOS-862, KOS-1584, ZK-EPO, ABJ-789, XAA296A (Discodermolide), TZT-1027 (soblidotin), ILX-651 (tasidotin hydrochloride), Halichondrin B, Eribulin mesylate (E-7389), Hemiasterlin (HTI-286), E-7974, Cyrptophycins, LY-355703, Maytansinoid immunoconjugates (DM-1), MKC-1, ABT-751, T1-38067, T-900607, SB-715992 (ispinesib), SB-743921, MK-0731, STA-5312, eleutherobin, 17beta-acetoxy-2-ethoxy-6-oxo-B-homo-estra-1,3,5(10)-trien-3-ol, cyclostreptin, isolaulimalide, laulimalide, 4-epi-7-dehydroxy-14,16-didemethyl-(+)-discodermolides, and cryptothilone 1, in addition to other microtubuline stabilizing agents known in the art.

[0338] Combination treatments can be administered simultaneously or sequentially. In certain examples, combinations are fixed dose combinations.

[0339] In cases where it is desirable to render aberrantly proliferative cells quiescent in conjunction with or prior to treatment with the antibodies described herein, hormones and steroids (including synthetic analogs), such as 17a-Ethinylestradiol, Diethylstilbestrol, Testosterone, Prednisone, Fluoxymesterone, Dromostanolone propionate, Testolactone, Megestrolacetate, Methylprednisolone, Methyl-testosterone, Prednisolone, Triamcinolone, Chlorotrianisene, Hydroxyprogesterone, Aminoglutethimide, Estramustine, Medroxyprogesteroneacetate, Leuprolide, Flutamide, Toremifene, ZOLADEX™, can also be administered to the patient. When employing the methods or compositions described herein, other agents used in the modulation of tumor growth or metastasis in a clinical setting, such as antimimetics, can also be administered as desired.

[0340] Methods for the safe and effective administration of chemotherapeutic agents are known to those skilled in the art. In addition, their administration is described in the standard literature. For example, the administration of many of the chemotherapeutic agents is described in the Physicians' Desk Reference (PDR), e.g., 1996 edition (Medical Economics Company, Montvale, N.J. 07645-1742, USA); the disclosure of which is incorporated herein by reference thereto.

[0341] The chemotherapeutic agent(s) and/or radiation therapy can be administered according to therapeutic protocols well known in the art. It will be apparent to those skilled in the art that the administration of the chemotherapeutic agent(s) and/or radiation therapy can be varied depending on the disease being treated and the known effects of the chemotherapeutic agent(s) and/or radiation therapy on that disease. Also, in accordance with the knowledge of the skilled clinician, the therapeutic protocols (e.g., dosage amounts and times of administration) can be varied in view of the observed effects of the administered therapeutic agents on the patient, and in view of the observed responses of the disease to the administered therapeutic agents.

[0342] The present disclosure is further illustrated by the following examples, which should not be construed as further limiting. The contents of all figures and all references, Genbank sequences, patents and published patent applications cited throughout this application are expressly incorporated herein by reference. In particular, the disclosures of PCT applications WO 09/045957, WO 09/073533, WO 09/073546, WO 09/054863, PCT/US2013/072918, PCT/US15/61632, and U.S. Patent Publication No. 2011/0150892 are expressly incorporated herein by reference.

### EXAMPLES

### Example 1: Enhanced Internalization of Anti-CD73 Antibodies with an IgG2 Hinge Relative to the Same Antibodies with a Non-IgG2 Hinge

[0343] It had been observed that hybridoma derived anti-CD73 antibody 11F11, which has an IgG2 constant region, is more potent in cellular CD73 inhibition assays than the 11F11 antibody as an IgG1 or IgG1.1 (effectorless IgG1), and more potent than other anti-CD73 antibodies having IgG1 constant regions. Based at least on this observation, it was hypothesized that increased inhibitory activity of anti-CD73 antibodies having IgG2 hinges relative to those having non-IgG2 hinges, such as IgG1 hinges, was due to increased internalization of the antibodies. To test this hypothesis, anti-CD73 antibodies having IgG1 or IgG2 constant regions or portions thereof were tested in internalization assays.

[0344] The antibodies that were used are listed in Table 7 which provides the identities of each of the domains of the constant regions (all human) of each antibody, including specific mutations if present.

TABLE 7

| | | | | | | HC | LC |
|---|---|---|---|---|---|---|---|
| | | | | | | SEQ | SEQ |
| Name of | | | | | | ID | ID |
| antibody | VH | CH1 | Hinge | CH2 | CH3 | NO¹ | NO² |
| 11F11 | 11F11 | IgG2 | IgG2 | IgG2 | IgG2 | 44 | 72 |
| 4C3 | 4C3 | IgG1 | IgG1 | IgG1 | IgG1 | 45 | 73 |
| 6D11 | 6D11 | IgG1 | IgG1 | IgG1 | IgG1 | 46 | 74 |
| CD73.10- | CD73.10 | IgG2 | IgG2 | IgG2 | IgG2 | 47 | 72 |
| IgG2- | | | (C219S) | | | | |
| C219S | | | | | | | |
| CD73.10- | CD73.10 | IgG2 | IgG2 | IgG1.1 | IgG2 | 48 | 72 |
| IgG2- | | | (C219S) | (A330S/ | | | |
| C219S- | | | | P331S) | | | |
| IgG1.1 | | | | | | | |
| CD73.10- | CD73.10 | IgG1.1 | IgG1.1 | IgG1.1 | IgG1.1 | 49 | 72 |
| IgG1.1 | | | (L234A/ | (A330S/ | | | |
| | | | L235E/ | P331S) | | | |
| | | | G237A) | | | | |
| CD73.4- | CD73.10 | IgG2 | IgG2 | IgG2 | IgG2 | 50 | 72 |
| IgG2- | | | (C219S) | | | | |
| C219S | | | | | | | |
| CD73.3- | CD73.3 | IgG1.1 | IgG1.1 | IgG1.1 | IgG1.1 | 51 | 73 |
| IgG1.1 | | | (L234A/ | (A330S/ | | | |
| | | | L235E/ | P331S) | | | |
| | | | G237A) | | | | |

¹SEQ ID NO of full length heavy chain
²SEQ ID NO of full length light chain

[0345] The antibodies were made by expressing the heavy and light chains in HEK293-6E cells, and culture media was harvested 5 days after transfection.

[0346] Binding of the constructs to FcγRs was measured. hCD64 and hCD32a-H131 binding data for IgG1.1 and IgG2 molecules were consistent with expected values for the different Fcs. IgG1.1f is the most inert Fc. IgG2 and IgG2-C219S showed typical FcR binding for IgG2. As expected, data for IgG2-C219S-G1.1f suggests significantly weaker binding than wild type IgG1 or IgG2, but increased binding compared to IgG1.1f.

[0347] The affinity of the antibodies for human CD73 was measured to determine whether the change of the constant region affects them. The affinities were determined by Surface Plasmon Resonance (SPR) as follows. CD73 binding kinetics and affinity were studied by surface Plasmon resonance (SPR) using a Biacore T100 instrument (GE Healthcare) at 25° C. This experiment tested the binding of the N-terminal domain of hCD73 (consisting of residues 26-336 of human CD73; termed N-hCD73) to antibodies that were captured on immobilized protein A surfaces. For these experiments, protein A (Pierce) was immobilized to a density of 3000-4000 RU on flow cells 1-4 of a CM5 sensor chip (GE Healthcare) using standard ethyl(dimethylaminopropyl) carbodiimide (EDC)/N-hydroxysuccinimide (NETS) chemistry, with ethanolamine blocking, in a running buffer of 0.01 M HEPES pH 7.4, 0.15 M NaCl, 3 mM EDTA, 0.005% v/v tween 20. Kinetic experiments were performed by first capturing antibodies (5-10 ug/ml) on the protein A surfaces using a 30 s contact time at 10 ul/min, with binding of 600, 200, 66.7, 22.2, 7.4, and 2.5 nM N-hCD73-his, using a 180 s association time and 360 s dissociation time at a flow rate of 30 ul/min. The running buffer for the kinetic experiments was 10 mM sodium phosphate, 130 mM sodium chloride, 0.05% tween 20, pH 7.1. The surfaces were regenerated after each cycle using two 30 s pulses of 10 mM glycine pH 1.5 at a flow rate of 30 μl/min. Sensogram data was double-referenced and then fitted to a 1:1 Langmuir model using Biacore T100 evaluation software v2.0.4, to determine the association rate constant (ka), the dissociation rate constant (kd), and the equilibrium dissociation constant (KD).

[0348] The results are shown in Table 8. The table compiles data from different experiments. For antibodies for which two sets of numbers are shown, each set corresponds to data obtained in a separate experiment.

TABLE 8

| | | ka | kd | KD |
|---|---|---|---|---|
| mAb | Fc | (1/Ms) | (Vs) | (nM) |
| 11F11 | IgG2 | 2.6E+05 | 4.2E−04 | 1.6 |
| | | 2.9E+05 | 1.6E−04 | 0.56 |
| 4C3 | IgG1 | 2.2E+04 | 2.4E−03 | 110 |
| | | 2.4E+04 | 2.2E−03 | 92 |
| 6E11 | IgG1 | 5.7E+04 | 1.4E−03 | 25 |
| CD73.10 | IgG1.1 | 2.7E+05 | 1.3E−03 | 4.7 |
| CD73.10 | IgG2- | 2.2E+05 | 1.4E−03 | 6.2 |
| | C219S | 2.2E+05 | 1.8E−03 | 8.3 |
| CD73.10 | IgG2- | 2.4E+05 | 1.4E−03 | 5.7 |
| | C219S- | 2.3E+05 | 1.60E−03 | 6.8 |
| | IgG1.1 | | | |
| CD73.4 | IgG2- | 2.9E+05 | 1.6E−04 | 0.55 |
| | C219S | 2.8E+05 | 3.3E−04 | 1.2 |
| | | 2.9E+05 | 3.7E−04 | 1.3 |
| CD73.3 | IgG1.1 | 1.6E+04 | 3.6E−03 | 220 |

[0349] The results indicate that the presence of the different constant regions in an antibody, e.g., CD73.10, did not change the affinity of the antibody to human CD73.

The internalization of anti-CD73 antibodies was measured in two different assays.

[0350] A. High-Content Internalization Assay (2 Hour Fixed Time Assay)

[0351] The anti-CD73 antibodies used to test anti-CD73 antibody dependent CD73 internalization in Calu6 cells by assessing cellular expression after 2 hours of antibody incubation. Cells (2,000 cells/well) in 20 μl of complete medium (Gibco RPMI Media 1640 with 10% heat inactivated fetal bovine serum) were plated in 384 BD Falcon plate and grown overnight at 37° C. 5% CO₂ and 95% humidity. Anti-CD73 antibodies were serially diluted with PBS buffer containing 0.2% BSA, and added 5 μl/well into the cell plate. The cells were incubated with antibodies for 2 hours at 37° C. 5% CO₂ and 95% humidity, followed by washing once with PBS buffer. Formaldehyde (final 4% in PBS) was then added into the cell plate at 20 ul/well, and the plate was incubated at room temperature for 10 minutes. Afterwards, all liquid was aspirated and cells were washed once with 30 ul PBS. Detection antibody (2.5 μg/well of anti-CD73 Ab CD73.10.IgG2C219S) was added at 15 μg/well into the fixed cell plate. The cells were incubated at 4° C. overnight. On the next day, the plate was washed twice with PBS buffer, followed by adding secondary antibody containing Alexa-488 goat anti human and DAPI, stained for 1 hour at room temperature. After 3 washes in PBS buffer, the plate was imaged on Arrayscan Vti (Cellomics, Pittsburgh, Pa.). IC₅₀ and Ymax were measured. Ymax was determined by comparing to 100 nM dose of 11F11 as internal maximum. All calculations were determined as a percentage of internalization compared to this control, which was set to 100%.

[0352] The results are provided in Table 9.

TABLE 9

| | Constant | Epitope | EC50 | |
|---|---|---|---|---|
| mAb | region | bin | (nM) | Ymax |
| 11F11 | IgG2 | 1 | 0.58 | 98 |
| 4D4 | IgG2 | 1 | 0.38 | 104 |
| 10D2 | IgG1 | 1 | ND | 29 |
| 24H2 | IgG1 | 1 | 8.2 | 51 |
| 7A11 | IgG1 | 1 | 2.59 | 50 |
| CD73.4 | IgG2-C219S- | 1 | 1.2 | 97 |
| | IgG1.1 | | | |
| CD73.10 | IgG1.1 | 1 | 6.18 | 64 |
| CD73.10 | IgG2-C219S | 1 | 0.67 | 99 |
| CD73.10 | IgG2-C219S- | 1 | 0.87 | 99 |
| | IgG1.1 | | | |

ND = Not Detected
NA = Not Applicable

[0353] The results show that anti-CD73 antibodies having an IgG2 hinge have a lower EC50 and higher Ymax.

[0354] Kinetic internalization studies were performed to assess the rate of internalization. Several cells lines were tested: H2228 cells, HCC15 cells, Calu6 cells, and NCI-H2030. Cells (2,000 cells/well) in 20 μl of complete medium (Gibco RPMI Media 1640 with 10% heat inactivated fetal bovine serum) were plated in 384 BD Falcon plate and grown overnight at 37° C. 5% CO₂ and 95% humidity. CD73 antibodies were diluted with PBS buffer containing 0.2% BSA to 10 μg/ml and added 5 μl/well into the cell plate. The cells were incubated with antibodies for 0-2 hour time course at 37° C., followed by washing once with PBS buffer. The cells were subsequently fixed with formaldehyde (final 4% in PBS) at room temperature for 10 minutes, and then washed once with 30 ul PBS. Detection antibody (2.5 μg/well anti-CD73 Abs CD73.10.IgG2C219S) were diluted with PBS buffer containing 0.2% BSA, and added 15 μl/well into the fixed cell plate. The plate was incubated at 4° C. for overnight. On the next day, after 3 washes in PBS buffer, Secondary antibody Alexa488-goat anti human with DAPI were added. The cells were stained for 60 minutes at room temperature, after 3 washes, images were acquired using Arrayscan Vti (Cellomics, Pittsburgh, Pa.). The results are provided in FIGS. 1A-J and Tables 10 and 11. The values in Table 10 derive from the data shown in FIGS. 1A-J.

TABLE 10

| | 11F11 | 6E11 | CD73.10. |
|---|---|---|---|
| Cell | (IgG2) | (IgG1) | IgG1.1f |
| line | T_{1/2} (min) | T_{1/2} (min) | T_{1/2} (min) |
| Calu6 | 3.9 | 60.9 | 14.4 |
| HCC44 | 3.3 | 27.9 | 23.5 |
| H2030 | 3.3 | 40.3 | 18.3 |
| H647 | 45.7 | N/A | N/A |
| H2228 | 10.9 | 36.5 | 35.7 |
| HCC15 | 2.2 | 84.4 | 37.9 |
| SKLU1 | 6.8 | 18.0 | 17.2 |
| SKMES1 | 2.2 | 62.8 | 32.3 |
| SW900 | 10.3 | 94.9 | 43.4 |

TABLE 11
T_{1/2} and % internalization of CD73 antibodies in 4 human cell lines

| | H228 cells | | HCC15 cells | | Calu6 cells | | H2030 cells | |
|---|---|---|---|---|---|---|---|---|
| | | % | | % | | % | | % |
| | T_{1/2} | interna- | T_{1/2} | interna- | T_{1/2} | interna- | T_{1/2} | interna- |
| | min | lization | min | lization | min | lization | min | lization |
| CD73.11-IgG2CS | — | — | — | — | 4.1 | 89 | 4.6 | 85 |
| CD73.10-IgG2CS | 9.7 | 93 | 2.6 | 91 | 3.0 | 91 | 3.3 | 85 |
| CD73.10-IgG2CS- | 9.4 | 92 | 3.0 | 91 | 3.1 | 91 | 4.3 | 87 |
| IgG1.1f | | | | | | | | |
| CD73.4-IgG2CS | 13.8 | 94 | 3.1 | 94 | 6.5 | 88 | 3.7 | 89 |
| CD73.10-IgG1.1f | 35.7 | 33 | 37.9 | 71 | 14.4 | 63 | 18.3 | 67 |
| CD73.3-IgG1.1f | 16.5 | 47 | >240 | 38 | 111.4 | 79 | >120 | 27 |
| 11F11 | 10.9 | 96 | 2.2 | 94 | 3.9 | 87 | 3.3 | 90 |
| 4C3 | 7.6 | −48 | 141.5 | 28 | 0.6 | −6 | >120 | −34 |
| 6E11 | 36.5 | 13 | 84.4 | 64 | 107.4 | 68 | 40.32 | 51 |

[0355] The results indicate that 11F11 (an IgG2 antibody) internalized within minutes, reaching a plateau in 30 minutes, whereas 6E11 (an IgG1 antibody) internalized more slowly, reaching a plateau at about 1 hr (FIGS. 1A-J). Similarly, 11F11 with an IgG1 constant region internalized more slowly than 11F11 with an IgG2 constant region. This trend was observed in several cell lines (Tables 10 and 11 and FIGS. 1A-J).

[0356] B. Internalization Measured by Flow Cytometry

[0357] Anti-CD73 antibody mediated internalization of CD73 was also tested by flow cytometry. Indicated cells were incubated with 10 μg/mL of the indicated antibody for 30 minutes on ice, washed several times, and transferred to 37° C. for the indicated time. Cells were harvested at the same time after the indicated incubation time. Cells were stained with primary antibody again (same antibody used for initial incubation) followed by anti-human secondary antibody. Cells were then assayed for expression of CD73 by flow cytometry.

[0358] The results, which are shown in FIG. 1E and Table 11, are consistent with those obtained in the internalization assays described above, and indicate that, all antibodies with IgG2 hinge and CH1 induced rapid and complete internalization. The CD73 levels remained low after 22 hours post wash-out, indicating that internalization is durable.

[0359] Similar results shown in FIG. 1F and Table 11 were obtained in the NCI-H292 cell line in which the antibody was maintained in culture during the incubation time (no wash-out). Again, these data indicate rapid and significant internalization and maintenance of downregulation of endogenous CD73.

[0360] Internalization assays were also conducted with the human SNU-C1 (colon cancer cell line) and NCI-H1437 (non-small cell lung carcinoma cell line) cells. The results, which are shown in FIGS. 1I and J, also indicate rapid internalization with a maximal level reached within 5 hours and a maximal level of internalization of about 50% for CD73.4.IgG2-C219S-IgG1.1f in SNU-C1 and 60% for NCI-H1437 cells. FIGS. 1G and H show similar kinetics of internalization of CD73.4.IgG2-C219S-IgG1.1f in Calu6 and NCI-H292 cells. For graphs, which show % of CD73 internalized, this number was obtained as follows:

$$\% CD 73 internalized = 100 - ( \frac{{MFI}_{t = x} - {MFI}_{background}}{{MFI}_{t = 0} - {MFI}_{background}} \times 100 )$$

where for each antibody, MFIₜ₌ₓ is the MFI at a given timepoint and MFIₜ₌₀ is maximal fluorescence at t=0, and MFI_{background} is the MFI of the secondary Ab only.

TABLE 12
EC₅₀ of antibody mediated CD73 internalization in several cell lines (data
from FIGS. 1G-I)

| | | | | | | | SN1J-C1 | | | | NCI-H1437 | |
|---|---|---|---|---|---|---|---|---|---|---|---|---|
| | Calu6 | | NCI-H292 | | SN1J-C1 | | (no wash) | | NCI-H1437 | | (no wash) | |
| | Ymax | T_{1/2} | Ymax | T_{1/2} | Ymax | T_{1/2} | Ymax | T_{1/2} | Ymax | T_{1/2} | Ymax | T_{1/2} |
| | (%) | (hr) | (%) | (hr) | (%) | (hr) | (%) | (hr) | (%) | (hr) | (%) | (hr) |
| mAb- | 76.8 | 0.5661 | 77.64 | 0.2633 | 48.96 | 0.4954 | 38.39 | 1.025 | 63.12 | 0.3164 | 62.78 | 0.3418 |
| CD73.4- | | | | | | | | | | | | |
| IgG2- | | | | | | | | | | | | |
| IgG1.1f | | | | | | | | | | | | |
| mAb- | 75.59 | 0.6003 | 78.42 | 0.2766 | — | — | — | — | — | — | — | — |
| CD73.4- | | | | | | | | | | | | |
| IgG2 | | | | | | | | | | | | |
| mAb- | 44.99 | 1.737 | 51.49 | 0.2087 | 30.58 | 0.9915 | 33.16 | 2.33 | 49.76 | 0.4915 | 49.95 | 0.5384 |
| CD73.4- | | | | | | | | | | | | |
| IgG1.1f | | | | | | | | | | | | |

[0361] Thus, anti-CD73 antibodies with an IgG2 hinge internalize faster and to a greater extent relative to anti-CD73 antibodies with an IgG1 hinge.

### Example 2: Enhanced Agonist Activity of GITR Antibodies with an IgG2 Hinge Relative to the Same Antibodies with an IgG1 Hinge

[0362] This Example demonstrates that anti-GITR antibodies comprising an IgG2 hinge have an increased ability to induce IL-2 and IFN-γ secretion from T cells relative to the same antibodies that have an IgG1 hinge.

[0363] It had been observed in CHO-OKT3 and 3A9 assays described above that hybridoma derived antibodies, having an IgG2 constant region, are more potent in stimulating cytokine secretion than the same antibodies in which the heavy chain constant region was switched to that of IgG1 or an effectorless IgG1 (IgG1.1). Therefore, the effect of an IgG2 constant region or hinge was further tested on anti-GITR antibodies in these assays.

[0364] The heavy chain variable region of an anti-human GITR antibody (SEQ ID NO: 75) was linked to the heavy chain constant regions shown in Table 13. The light chain of the anti-GITR antibodies comprised SEQ ID NO: 77. Table 13 shows the identity of each domain of the constant regions:

TABLE 13
Heavy chain constant regions of antibodies used in this Example

| Name of antibody | CH1 | Hinge | CH2 | CH3 | SEQ ID NO* |
|---|---|---|---|---|---|
| anti-GITR | IgG2 | IgG2 | IgG2 | IgG2 | SEQ ID NO: 52 |
| | SEQ ID NO: 7 | SEQ ID NO: 8 | SEQ ID NO: 9 | SEQ ID NO: 10 | |
| anti-GITR-IgG2 | IgG2 | IgG2 | IgG2 | IgG2 | SEQ ID NO: 52 |
| | SEQ ID NO: 7 | SEQ ID NO: 8 | SEQ ID NO: 9 | SEQ ID NO: 10 | |
| anti-GITR-IgG1 | IgG1 | IgG1 | IgG1 | IgG1 | SEQ ID NO: 53 |
| | SEQ ID NO: 2 | SEQ ID NO: 3 | SEQ ID NO: 4 | SEQ ID NO: 5 | |
| anti-GITR-IgG1.1 | IgG1.1 | IgG1.1 | IgG1.1 | IgG1.1 | SEQ ID NO: 54 |
| | SEQ ID NO: 2 | (L234A/L235E/G237A) | (A330S/P331S) | SEQ ID NO: 5 | |
| | | SEQ ID NO: 25 | SEQ ID NO: 24 | | |
| anti-GITR-IgG2-IgG1 | IgG2 | IgG2/IgG1 hybrid | IgG1 | IgG1 | SEQ ID NO: 55 |
| or anti-GITR.g2.g1 | SEQ ID NO: 7 | SEQ ID NO: 22 | SEQ ID NO: 4 | SEQ ID NO: 5 | |
| anti-GITR-IgG2- | IgG2 | IgG2 | IgG1.1 | IgG1 | SEQ ID NO: 56 |
| IgG1.1 | SEQ ID NO: 7 | SEQ ID NO: 8 | (A330S/P331S) | SEQ ID NO: 5 | |
| or | | | SEQ ID NO: 24 | | |
| anti-GITR.g2.g1.1 | | | | | |

*SEQ ID NO of full-length heavy chain constant region

[0365] First, the binding affinities of these GITR antibodies were compared to those of GITR antibodies having an IgG1 hinge. The binding affinities of the anti-GITR antibodies to soluble GITR was determined by Biacore as follows. Anti-GITR antibodies were captured on human kappa coated chips (˜5KRUs; Southernbiotech cat #2060-01), and recombinant human GITR (rHGITR/Fc: R&D systems, CAT #689-GR) was flowed across the chip at concentrations of 500 nM, 250 nM, 125 nM, 62 nM, and 31 nM. The capture concentration of the mAb/volume was 2-40 μg/mL (5 μL at 10 μL/min). The antigen association time was 5 minutes at 15 μL/min, the antigen dissociation time was 6 minutes, and regeneration was performed with 50 mM HCl/50 mM NaOH (12 μL each at 100 μL/min).

[0366] The results, which are shown in FIG. 2, indicate that all three GITR antibodies having an IgG2 hinge have similar affinities for activated T cells as GITR antibodies have IgG1 or IgG1.1 constant region.

[0367] Next, the ability of GITR antibodies having an IgG1 constant region or IgG2 hinge/IgG1 Fc domain were tested for their ability to induce IL-2 and IFN-γ secretion from human donor T cells stimulated with anti-CD3scFv (OKT3)-expressing CHO cells. The CHO cells expressed low levels of OKT3 to promote suboptimal stimulation to be able to observe agonism by anti-GITR antibodies. CD4+ T cells from a donor were stimulated with OKT3 expressing CHO cells and an anti-GITR antibody, and IL-2 and IFN-γ secretion was measured. The experiments were conducted as follows. For experiments with CD4+ T cells, CD4+ T cells were obtained from human PBMCs with RosetteSep Human CD4+ T cell enrichment cocktail (StemCell Technology #15062) according to the manufacturer's protocol. CHO cells expressing anti-CD3scFv (OKT3) (CHO-OKT3) were washed twice with RPMI medium and subjected to irradiation with a dosage of 50K Rad. Cells were harvested and resuspended in culture medium (RPMI-1640 supplemented with 10% Fetal Bovine Serum, 2 mM L-glutamine, 55 nM β-Mercaptoethanol, 1 mM sodium pyruvate, and 100U/mL Penicillin/streptomycin) at 2.5×10⁵/mL. 2.5×10⁴ CHO-OKT3 cells and 1×10⁵ T cells were seeded per well in a 96-well TC grade flat-bottom plate (Costar). Cells were incubated with an 8-point, 4-fold titration of GITR antibody starting at 40 μg/mL. An irrelevant hIgG1 was added at 40 μg/mL as an isotype control. A sample with cells only was included to show baseline activity without any treatment. Supernatant from each sample was harvested at day 2 for IL-2 measurement (only for assays with CD4+ T cells) (BD opt EIA Human IL-2 ELISA kit; BD Bioscience #555190) and at day 3 for IFN-γ measurement (BD optETA human IFN-g ELISA Kit; BD Bioscience #555142).

[0368] As shown in FIGS. 3A and B, the antibody with the IgG2 hinge/IgG1 Fc domain (anti-GITR.g2.g1) induced both IL-2 and IFN-γ secretion from T cells to a higher degree than the antibody with the IgG1 constant region (anti-GITR.g1). Similar results were obtained with the effectorless versions of these constant domains (FIG. 3C).

[0369] To further confirm the increased activation of T cells with the anti-GITR antibodies comprising an IgG2 hinge, IL-2 secretion in a different experimental format was tested. In this experiment, the ability of GITR antibodies to induce IL-2 secretion from 3A9-hGITR cells (mouse T cell hybridoma 3A9 cell line ectopically expressing human GITR) was tested as follows. Mouse T cell hybridoma 3A9 cell line which ectopically expresses human GITR (3A9-hGITR) was cultured on anti-CD3 monoclonal antibody-coated plates in the presence of increasing amounts of the indicated antibodies. 5×10⁴ 3 A9-hGITR cells were cultured on plates coated with 1 μg/ml anti-CD3 antibody (Clone 145-2C11; BD Biosciences), and treated with the indicated concentrations of antibodies for 7 hours.

[0370] As shown in FIG. 4, all antibodies having the IgG2 hinge (anti-GITR.g2, anti-GITR.g2.g1f, and anti-GITR.g2.g1.f) induced IL-2 secretion from 3A9-hGITR cells to a higher degree than their IgG1 constant region containing counterparts (anti-GITR.g1f and anti-GITR.g1.1f).

[0371] These results collectively suggest that anti-GITR antibodies having an IgG2 hinge and g1 or g1.1 constant regions are more potent than the same antibodies having an IgG1 hinge.

### Example 3: Impact of Different Hinge/Fc Combinations on Size of Antibody/Antigen Complexes

[0372] As shown in the above Examples, anti-CD73 antibodies with an IgG2 hinge are better inhibitors of CD73 cellular activity and internalize better than the same antibodies with an IgG1 hinge and anti-GITR antibodies with an IgG2 hinge are more potent agonists than the same antibodies with an IgG1 hinge. Based on this observation, and the fact that an IgG2 hinge is stiffer than an IgG1 hinge, it was hypothesized that larger complexes are formed between an antigen and antibodies having an IgG2 hinge relative to antibodies having an IgG1 hinge. The following experiment was conducted to analyze this hypothesis.

[0373] The structure and oligomeric state of CD73/antibody complexes in solution were examined by SEC-MALS and DLS. For these studies, antibodies containing either an IgG1 or IgG2 constant region, were mixed at varying molar ratios with recombinant proteins comprising either the full length extracellular domain of human-CD73 containing a C-terminal polyhistidine tag (amino acid residues 26-546 of human-CD73, termed hCD73-his) or a fragment corresponding to the N-terminal domain of human-CD73 (amino acid residues 26-336, termed N-hCD73-his).

[0374] The oligomeric state of CD73/antibody complexes were examined by size-exclusion chromatography coupled to an in-line multi-angle light scattering detector (SEC-MALS). Isocratic separations were performed on a Shodex PROTEIN KW-803 column connected to an Prominence Shimadzu UFLC in buffer containing 200 mM K2HPO4, 150 mM NaCl, pH 6.8, containing 0.02% Na azide (0.1 μm filtered) running at 0.5 mL/min. Samples were injected onto the column using a SIL-20AC Prominence Shimadzu autosampler, and data were obtained from three online detectors connected in series: a Prominence SPD-20AD diode array UV/vis spectrophotometer followed by a Wyatt miniDAWN™ TREOS Multi-Angle Light Scattering Detector then a Wyatt Optilab T-rEX Refractive Index Detector. Data were collected and analyzed using Astra (Wyatt) and Labsolutions (Shimadzu) software.

[0375] Dynamic light scattering (DLS) studies were performed on a Wyatt DynaPro plate reader in 384 well plates at 25° C. Experimental parameters were 20 acquisitions of 5 s each per measurement, and measurements were recorded in quadruplicate, with the average and standard deviation reported. Intensity autocorrelation functions were fitted using the “Regularization” algorithm in the Dynamics software (Wyatt Technologies).

[0376] A summary of the SEC-MALS and DLS is provided in FIG. 6 and FIG. 7. Analysis of the antibodies alone, shows retention times (about 16-17 min), masses (140-150 kDa), and hydrodynamic radii (5.0-5.4 nm) for each antibody that are typical for a monomeric monoclonal antibody. The data for the hCD73-his protein is consistent with the protein adopting the expected dimeric structure in solution; in particular, the mass determined from the SEC-MALS data (120 kDa) is consistent with that expected for a CD73-his dimer (117 kDa) and inconsistent with what would be expected for a hCD73-his monomer (58.5 kDa). The data for N-hCD73 is consistent with the recombinant N-domain protein being monomeric in solution (SEC-MALS measured mass=38 kDa, compared to expected monomeric mass=35.0 kDa), which is expected because the region of the full length CD73 extracellular domain that is responsible for dimerization of the protein is contained within the C-terminal domain without contribution of N-domain residues.

[0377] Equimolar mixtures of a given antibody with N-hCD73-his were found to elute as a single species in the SEC with shorter retention time than the antibody or N-hCD73-his alone, as well as larger hydrodynamic radii (Rh) by DLS, which is consistent with the formation of complexes. MALS data indicate masses for these complexes of approximately 210 kDa. This is consistent with one N-hCD73-his molecule bound to each of the two Fab domains of a given antibody to form a 1:2 antibody:N-hCD73-his complex.

[0378] SEC-MALS data for mixtures of anti-CD73 antibodies with hCD73-his dimer shows that the mixture elutes earlier than either the hCD73-his or antibody alone, suggesting that complexes are formed. Comparing the data for mAbs that contain the same variable region but different constant domains, shows that the elution times for the complexes of hCD73-his with mAbs containing a IgG2 constant domains (IgG2-C219S, IgG2-C219S-IgG1.1f) are earlier than those for complexes of hCD73-his with mAbs containing an IgG1.1f constant domain. In addition, the MALS-determined masses for complexes of hCD73-his with mAbs containing an IgG2 constant domain are larger than those for complexes of hCD73-his with mAbs containing an IgG1 constant domain. DLS data further shows that the hydrodynamic radius of complexes of hCD73-his with mAbs containing a IgG2 constant domain are larger than those for complexes of hCD73-his with mAbs containing an IgG1 constant domain. For example, the SEC-MALS and DLS data for CD73.4 with three different constant regions (IgG2-C219S, IgG2-C219S-IgG1.1f, or IgG1.1f) is shown in FIG. 5. Here it can be seen that the complex of hCD73-his with CD73.4 containing the IgG2 constant domain have shorter retention times (FIG. 5A), larger hydrodynamic radii (FIG. 5B) and larger MALS-determined masses (FIG. 5C), as compared to the complexes of hCD73-his with CD73.4-IgG1.1f. Based on the MALS masses, a schematic model for the structure and stoichiometry of the complexes between hCD73-his and the antibodies is shown in FIG. 5D, where complexes containing CD73.4-IgG1.1f predominantly form smaller 2:2 (peak 1=˜550 kDa) or 4:4 mAb/CD73 dimer complexes (peak 2=˜1300 kDa), whereas CD73.4-IgG2-C219S or CD73.4-IgG2-C219S-IgG1.1f form much larger complexes (>3000 kDa) with hCD73-his, for which precise structure and stoichiometry cannot be confidently modeled.

[0379] Collectively the SEC-MALS and DLS data demonstrate that larger complexes are formed between hCD73-his and mAbs containing an IgG2 hinge region (IgG2-C219S or IgG2-C219S-IgG1.1f), compared to those containing the IgG1 hinge region (IgG1.1f).

### Example 4: CH1 of IgG2 Isotype Further Improves Antibody Mediated CD73 Internalization

[0380] Additional internalization assays were conducted in Calu6 and H292 cells to further discriminate the role of isotype on internalization. The internalization assays were conducted as described in Example 1A and 1B (flow cytometry protocol without the wash-out step of the antibodies), and the antibodies of varying hybrid isotypes shown in Table 14 were maintained in culture at 10 μg/mL during the incubation time. For the flow cytometry experiments, the method of Example 1B was adapted to high throughput analysis in 96 well plates (as opposed to 48 well plates) and with 50,000 cells per well.

TABLE 14
Constant regions tested with the variable regions of CD73.4:

| | SEQ ID NO | |
|---|---|---|
| | of constant | |
| Constructs | region | Description |
| IgG1f | 78 | wild type IgG1f |
| IgG1.1f | 83 | standard inert IgG1.1f |
| IgG2.3 | 79 | IgG2 A-form (C219S) |
| IgG2.5 | 82 | IgG2 B-form (C131S) |
| IgG2.3G1-KH | 81 | CH1, upper hinge and lower hinge/ |
| | | upper CH2 of IgG2.3, all else IgG1f |
| IgG2.5G1-KH | 90 | CH1, upper hinge and lower hinge/ |
| | | upper CH2 of IgG2.5, all else IgG1f |
| IgG2.3G1-AY | 80 | CH1 and upper hinge of IgG2.3, |
| | | all else IgG1f |
| IgG2.5G1-AY | 89 | CH1 and upper hinge of IgG2.5, |
| | | all else IgG1f |
| IgG1-G2.3G1-KH | 93 | CH of IgG1, upper hinge and lower |
| | | hinge/upper CH2 of IgG2.3, all else |
| | | IgG1f |
| IgG1-G2.3G1-AY | 92 | CH1 of IgG1, upper hinge of IgG2.3, |
| | | all else IgG1f |
| IgG2.3G1.1f-KH | 84 | CH1, upper hinge and lower hinge/ |
| | | upper CH2 of IgG2.3, all else IgG1.1f |
| IgG2.5G1.1f-KH | 88 | CH1, upper hinge and lower hinge/ |
| | | upper CH2 of IgG2.5, all else IgG1.1f |
| IgG1-deltaTHT | 85 | IgG1 with THT sequence removed |
| | | from hinge |
| IgG2.3-plusTHT | 86 | IgG2.3 with THT sequence (from |
| | | IgG1) added into hinge |
| IgG2.5-plusTHT | 91 | IgG2.5 with THT sequence (from |
| | | IgG1) added into hinge |
| IgG2.3-plusGGG | 87 | IgG2.3 with flexible GGG sequence |
| | | added into hinge |

[0381] FcγR binding was shown to be as expected for each construct, i.e., FcγR binding is driven by lower hinge/CH2 region.

[0382] The results are shown in FIGS. 8A, B and C and in Tables 15 and 16. Data shown in Table 15 were generated using the same protocol described in Example 1B (without washing out the antibodies). Data shown in Table 16 were generated using the same protocol described in Example 1A.

TABLE 15
Ymax and T_{1/2} of antibody mediated CD73 internalization
in Calu6 and NCI-292 cells

| | Calu6 | | NCI-H292 | |
|---|---|---|---|---|
| | Ymax | T_{1/2} | Ymax | T_{1/2} |
| | (%) | (hr) | (%) | (hr) |
| mAb-CD73.4-IgG1f/LC- | 55.72 | 0.8452 | 73.05 | 0.5014 |
| 11F11-Vk2 | | | | |
| mAb-CD73.4-IgG2.3G1-AY- | 85.07 | 0.3326 | 90.25 | 0.272 |
| pTT5-SP | | | | |
| mAb-CD73.4-IgG2.3G1-KH | 81.62 | 0.3962 | 91.61 | 0.2801 |
| mAb-CD73.4-G1-G2.3-G1-AY | 72.7 | 0.4229 | 84.51 | 0.3083 |
| mAb-CD73.4-IgG1-deltaTHT | 69.27 | 0.5652 | 83.63 | 0.3441 |
| mAb-CD73.4-G1-G2.3-G1-KH | 65.67 | 0.5674 | 83.29 | 0.343 |
| mAb-CD73.4-IgG2.3-plusTHT | 81.19 | 0.3551 | 91.41 | 0.2935 |
| mAb-CD73.4-IgG2.3- | 81.72 | 0.3355 | 91.6 | 0.2712 |
| plusGGG | | | | |
| mAb-CD73.4-IgG2.5 | 78.98 | 0.3485 | 89.56 | 0.3057 |
| mAb-CD73.4-IgG2.5G1.1f-KH | 79.63 | 0.3527 | 90.86 | 0.2993 |
| mAb-CD73.4-IgG2.5G1-AY | 81.91 | 0.2901 | 91.3 | 0.2452 |
| mAb-CD73.4-IgG2.5G1-KH | 76 | 0.2837 | 90.75 | 0.256 |
| mAb-CD73.4- | 80.15 | 0.2869 | 89.6 | 0.2565 |
| IgG2.5plusTHT/LC | | | | |
| mAb-CD73.4-IgG2-C219S/LC | 82.35 | 0.3725 | 88.91 | 0.2866 |
| mAb-CD73.4-IgG2-C219S/LC | 82.54 | 0.3639 | 87.66 | 0.2845 |
| mAb-CD73.4-IgG1.1f + K/LC | 57.07 | 1.519 | 70.4 | 0.4969 |
| mAb-CD73.4-IgG2CS-IgG1.1f | 80.98 | 0.3508 | 90.35 | 0.2764 |

TABLE 16
Internalization characteristics of CD73.4 with various
constant regions in Calu6 cells

| | Internalization | |
|---|---|---|
| CD73_mAb_Clones | Max | Speed |
| CD73.4-IgG1f/LC-11F11-Vk2 | + | + |
| CD73.4-Vh-hHC-IgG2.3G1-AY- | ++++ | ++++ |
| pTT5-SP5 | | |
| CD73.4-Vh-hHC-IgG2.3G1-KH | ++++ | +++ |
| CD73.4-Vh-hHC-G1-G2.3-G1-AY | ++ | ++ |
| CD73.4-Vh-hHC-G1-G2.3-G1-KH | ++ | ++ |
| CD73.4-Vh-hHC-IgG1-deltaTHT | ++ | +++ |
| CD73.4-Vh-hHC-IgG2.3-plusTHT | ++++ | ++++ |
| CD73.4-Vh-hHC-IgG2.3-plusGGG | ++++ | ++++ |
| CD73.4-Vh-hHC-IgG2.5 | ++++ | ++++ |
| CD73.4-Vh-hHC-IgG2.5G1.1f-KH | ++ | ++++ |
| CD73.4-Vh-hHC-IgG2.5G1-AY | +++ | ++++ |
| CD73.4-Vh-hHC-IgG2.5G1-KH | +++ | ++++ |
| CD73.4-Vh-hHC-IgG2.5plusTHT/LC | ++++ | ++++ |
| CD73.4-Vh-hHC-IgG2-C219S/LC | ++++ | ++++ |
| CD73.4-Vh-hHC-IgG2-C219S/LC | ++++ | ++++ |
| CD73.4-Vh-hHC-IgG1.1f + K/LC | + | + |
| CD73.4-Vh-hCh-IgG2-C219S-IgG1.1f | ++++ | ++++ |

[0383] FIGS. 8A-C and Tables 15 and 16 indicate that antibodies having a hinge and CH1 domain of the IgG2 isotype are most efficient at driving internalization of CD73, whereas the antibodies that have an IgG1 hinge and CH1 domain correspond to the lower curves in the figure, i.e., lower extent of internalization. In addition, antibodies with only the hinge from IgG2 have an increased internalization compared to a human IgG1 hinge. Thus, antibodies having a hinge and CH1 domain of the IgG2 isotype have superior internalization characteristics relative to the antibodies with an IgG1 isotype.

[0384] Thus, anti-CD73 antibody mAb-CD73.4-IgG2CS-IgG1.1f (having an IgG2 hinge with C219S substitution and an IgG2 CH1 domain) induced rapid internalization dependent on cell line tested. The T_{1/2} for internalization ranged from minutes to under an hour. Most cell lines tested had a T_{1/2} under 10 minutes. A nearly complete internalization was induced for some cell lines and most tested had at least a 50% reduction in surface CD73 expression which typically reached maximal levels by 5 hours, much shorter in some cases.

### Example 5: IgG2 CH1 Enhances GITR Ab Induced IL-2 Secretion by CD4+ T Cells

[0385] This Example shows that a CH1 domain of the IgG2 isotype enhances anti-GITR antibody induced T cell activity, relative to the antibody with a CH1 domain of the IgG1 isotype.

[0386] The same modified heavy chain constant regions that were used in Example 4 were linked to the variable regions of the anti-GITR antibody (of Example 2). Donor CD4+ T cells were incubated with OKT3-scFv expressing CHO cells and the various anti-GITR antibodies, and the level of IL-2 secreted was measured. This was conducted as described in Example 2.

[0387] The results, which are shown in FIG. 9, indicate that all anti-GITR antibodies having a CH1 domain of the IgG2 isotype, in addition to a hinge of the IgG2 isotype, are more effective at stimulating IL-2 secretion from CD4+ T cells than thos having an IgG1 hinge and CH1.

[0388] Thus, this Example shows that the presence of an IgG2 hinge and IgG2 CH1 domain in an agonist anti-GITR antibody further enhances the agonist activity of the antibody relative to the same antibody that does not have a hinge and/or a CH1 domain of the IgG2 isotype. An antibody having both a hinge and a CH1 domain of the IgG2 isotype has a stronger agonist effect relative to an antibody having a hinge, but not CH1, of the IgG2 isotype Additionally, an antibody with a CH1 domain from IgG2 has a stronger agonist activity than an antibody with with a CH1 domain from IgG1 isotype. An antibody with a hinge from IgG2 and a CH1 domain from IgG1 has stronger agonist activity than an antibody with a CH1 and hinge from IgG1 isotype.

### Example 6: Relevance of Certain Amino Acid Residues in IgG2 CH1 and Hinge in Improving Antibody Mediated CD73 Internalization

[0389] Anti-CD73 antibodies (CD73.4) with the heavy chain constant regions shown in Table 17 were prepared and tested as described above in antibody mediated CD73 internalization assays.

TABLE 17
Heavy chain constant regions that were
fused to anti-CD73 variable regions

| | | SEQ ID NO |
|---|---|---|
| | | of constant |
| Description | Constructs | region |
| CH1 domain of IgG2, with | G2-G1-G1-G1 | 94 |
| all else IgG1. Also, Cy > Ser | G2.5-G1-G1-G1 | 95 |
| mutant to reduce potential | | |
| disulfide heterogeneity: | | |
| CH1 domain of IgG1, with | G1-G2.3-G2-G2 | 96 |
| all else IgG2.3: | | |
| Swap CH1 regions in IgG1 | G1-KRGEGSSNLF | 97 |
| with those of IGG2, either | G1-KRGEGS | 98 |
| separate or together: | G1-SNLF | 99 |
| | IgG1-ITNDRTPR | 100 |
| | G1-SNLFPR | 101 |
| Swap CH1 regions in IgG2 | G2-RKEGSGNSFL | 102 |
| with those of IGG1, either | G2-RKEGSG | 103 |
| separate or together: | G2-NSFL | 104 |
| | IgG2-TIDNTRRP | 105 |
| | G2-NSFLRP | 106 |
| IgG1 with CH2 domain | G1-G1-G2-G1-AY | 107 |
| residues of IgG2: | G1-G1-G2-G1-KH | 108 |
| IgG2 with CH2 domain | G2-G2.3-G1-G2-KH | 109 |
| residues of IgG1: | G2.5-G2.3-G1-G2-KH | 110 |
| | G2-G2.3-G1-G2-AY | 111 |
| | G2.5-G2.3-G1-G2-AY | 112 |
| Swap hinge regions | G1-G2.3-G1-G1-KH | 113 |
| between IgG1 and IgG2 | G2-G1-G2-G2-AY | 114 |
| | G2.5-G1-G2-G2-AY | 115 |
| | G1-G2-G1-G1-AY | 116 |
| | G2-G1-G2-G2-KH | 117 |
| | G2.5-G1-G2-G2-KH | 118 |
| Hinge truncations | IgG1-deltaHinge | 119 |
| | IgG2-deltaHinge | 120 |
| | IgG2.5-deltaHinge | 121 |
| | IgG1-deltaG237 | 122 |
| | IgG2-deltaG237 | 123 |
| Other | IgG2.4 | 124 |
| | IgG2.3/4 | 125 |

### EQUIVALENTS

[0390] The results, which are shown in FIG. 10, provide the following information in the context of CD73 internalization:
[0391] CH2 domain does not appear to have an impact as shown by
   [0392] a) very little difference in internalization ability was observed between the antibodies comprising a modified heavy chain constant region with format “AY” (having the IgG2 hinge ERKCCVECPPCPAPPVAG (SEQ ID NO: 8) relative to those with format “KH” (ERKCCVECPPCPAPELLGG (SEQ ID NO: 22) (Set 5, 6 and 7);
   [0393] b) CH2 swaps are comparable to wildtype G1 or G2 (Sets 5 and 6); and
   [0394] c) residue 237 has no impact on internalization: neither the addition of a “G” residue to an IgG2 hinge nor the deletion of the C terminal “G” in an IgG1 hinge affected internalization (Set 9).
[0395] This suggests that the CH2 domain does not impact internalization (i.e., the CH2 domain can be from IgG1 or IgG2);
[0396] Swapping the CH1 regions indicated in Set 3 (KRGEGSSNLF; KRGEGS; SNLF; ITNDRTPR and SNLFPR) in IgG1 with those of IgG2 provides little benefit, i.e., the internalization remains similar to that of IgG1; see Set 3);
[0397] Swapping the CH1 regions indicated in Set 4 (RKEGSGNSFL; RKEGSG; NSFL; TIDNTRRP and NSFLRP) in IgG2 with those of IgG1 has variable impact: changing NSFL has no impact, whereas the other 2 regions (RKEGSG & RP) are involved (see Set 4). Based on the results of Sets 3 and 4, it appears that there is an interaction between the CH1 region and the hinge, with RKEGSG and RP regions being more important than NSFL region;
[0398] The hinge region impacts internalization, i.e., the hinge of IgG2 provides better internalization relative to the hinge of IgG1 (see Sets 7 and 8). In addition, IgG1 with a deletion (G1-delta-hinge) improves internalization over IgG1. IgG2 with a deletion (G2-delta-hinge) provides a similar level of internalization relative to that of an IgG2 hinge. This suggests that the hinge region impacts internalization, which effect is enhanced by an IgG2 CH1 (G2-G1-G2-G2-AY is comparable to G1-G2-G1-G1-AY);
[0399] IgG2.4 (C220S) has similar or reduced internalization compared to IgG2.3 (C219S). IgG2.3/4 (C219S/C220S) has much reduced internalization compared to IgG2.3 or IgG2.4 alone (see Set 10). This suggests that internalization of an antibody with an IgG2 hinge and C219S is about the same as that of an IgG2 hinge with C220S, both of which are much better than that of an IgG2 hinge with both C219S and C220S;
[0400] IgG2.5 (C131S mutation) has reduced internalization compared to constructs with C131 (see Sets 1, 6 and 7).
[0401] Thus, these results indicate that the CH1 domain and the hinge are both relevant in the antibody mediated CD73 internalization, and that an antibody having the IgG2 sequences from these domains is internalized with better efficacy relative to an antibody having these regions from IgG1.

### Example 7: Antibodies Having an IgG2 Hinge and/or CH1 Domain Form High Molecular Weight Complexes

[0402] CD73.4 antibodies having the heavy chain constant regions set forth in Table 14 were also tested for formation of high molecular weight complexes by SEC-MALS and DLS experiments, as described in Example 3.

[0403] Three out of the 16 antibodies in this study were were previously tested: CD73.4-IgG1.1f, CD73.4-IgG2-C219S (also called CD73.4-IgG2.3), and CD73.4-IgG2-C219S-IgG1.1f (also called CD73.4-IgG2.3G1.1f-KH). SEC-MALS and DLS data of the antibodies alone showed retention times, masses, and hydrodynamic radii for each antibody that are typical for a monomeric monoclonal antibody. Equimolar complexes of each antibody (5.5 uM) with hCD73-his (5.5 uM) showed slower retention times for all complexes as compared to antibody or hCD73-his alone indicating the formation of complexes. An overlay of the SEC chromatogram data for each of the 16 complexes is shown in FIG. 11A. The chromatogram data can be divided into 4 distinct peaks, which are shown in FIG. 11B. Peak 1 contains the largest species, with MALS-determined masses suggesting complexes with mass equivalent of greater than 4:4 hCD73-his:mAb complexes. Peak 2 contains species with MALS-determined masses suggesting complexes of about 2:2 hCD73-his:mAb complexes. Peak 3 is a minor species with low signal and MALS-determined masses suggesting about 1:1 hCD73-his:mAb complexes. Peak 4 corresponds to the elution of the mAbs alone with MALS-determined masses consistent with free antibody. To quantitate the relative amounts of each species, the 4 peaks of each chromatogram were integrated as peak 1 (<12.9 min), peak 2 (12.9-15.1 min), peak 3 (15.1-16.7 min), peak 4 (16.7-19.3 min). The integration also included an additional integrated range called peak 5 (>19.3 min) to account for any low molecular weight species, which were found to be negligible (<3.5% for all complexes). The percentage of each species from this integration is summarized in Table 18. All complexes contained a similar small percentage of peak 3 (about 6-9%), but variable amounts of the other peaks. Most notable is that all complexes between hCD73-his and antibodies containing a CH1 domain from hIgG1 had a significantly greater percentage of smaller complexes (peak 2), whereas those containing CH1 domain from hIgG2 had a greater percentage of larger complexes (peak 1) (Table 18 and FIG. 11C). This suggests an important role for not only the hinge region but also the CH1 domain in higher order complex formation.

TABLE 18
Retention times of CD73.4 antibodies with
modified heavy chain constant regions

| | UV % | | | | |
|---|---|---|---|---|---|
| | Peak1 | Peak2 | Peak3 | Peak4 | Peak5 |
| | <12.9 | 12.9- | 15.1- | 16.7- | >19.3 |
| Complexes | min | 15.1 min | 16.7 min | 19.3 min | min |
| CD73.4- | 37.0 | 23.8 | 7.7 | 28.6 | 2.9 |
| IgG2.3 + hCD73-his | | | | | |
| CD73.4- | 36.0 | 23.8 | 7.9 | 29.3 | 3.0 |
| IgG2.3G1.1f-KH + hCD73-his | | | | | |
| CD73.4- | 28.4 | 36.2 | 7.4 | 25.6 | 2.3 |
| IgG1.1f + hCD73-his | | | | | |
| CD73.4- | 26.0 | 36.5 | 7.5 | 27.8 | 2.2 |
| IgG1f + hCD73-his | | | | | |
| CD73.4- | 30.2 | 24.3 | 8.1 | 34.4 | 3.0 |
| IgG2.3G1-AY + hCD73-his | | | | | |
| CD73.4- | 34.9 | 23.4 | 7.9 | 30.7 | 3.0 |
| IgG2.3G1-KH + hCD73-his | | | | | |
| CD73.4- | 14.6 | 29.2 | 6.4 | 48.3 | 1.6 |
| IgG1-G2.3G1-AY + hCD73-his | | | | | |
| CD73.4- | 23.8 | 32.6 | 7.0 | 34.5 | 2.1 |
| IgG1-G2.3G1-KH + hCD73-his | | | | | |
| CD73.4- | 28.3 | 35.4 | 7.0 | 26.9 | 2.4 |
| IgG1-deltaTHT + hCD73-his | | | | | |
| CD73.4- | 30.6 | 24.3 | 8.3 | 33.7 | 3.2 |
| IgG2.3-plusTHT + hCD73-his | | | | | |
| CD73.4- | 30.0 | 23.9 | 8.2 | 34.9 | 2.9 |
| IgG2.3-plusGGG + hCD73-his | | | | | |
| CD73.4- | 31.7 | 24.4 | 8.4 | 32.5 | 3.1 |
| IgG2.5 + hCD73-his | | | | | |
| CD73.4- | 30.7 | 24.3 | 8.9 | 32.7 | 3.4 |
| IgG2.5G1.1f-KH + hCD73-his | | | | | |
| CD73.4- | 26.3 | 24.8 | 8.1 | 38.3 | 2.6 |
| IgG2.5G1-AY + hCD73-his | | | | | |
| CD73.4- | 21.4 | 24.1 | 7.0 | 45.6 | 1.9 |
| IgG2.5G1-KH + hCD73-his | | | | | |
| CD73.4- | 32.6 | 23.5 | 8.3 | 32.6 | 3.0 |
| IgG2.5-plusTHT + hCD73-his | | | | | |

### Example 8: Fc Receptor Binding for Antibodies with Engineered Constant Domains

[0404] This Example demonstrates that antibodies having modified heavy chain constant regions comprising the CH1 and hinge of IgG2 bind to FcγRs when they contain CH2 and CH3 domains of IgG1.

[0405] In addition to antigen binding by the variable domains, antibodies can engage Fc-gamma receptors (FcgRs) through interaction with the constant domains. These interactions mediate effector functions such as antibody-dependent cellular cytotoxicity (ADCC) and antibody-dependent cellular phagocytosis (ADCP). Effector function activity is high for the IgG1 isotype, but very low or absent for IgG2 and IgG4 due to these isotypes having lower affinity for FcgRs. In addition, the effector function of IgG1 can be modified through mutation of amino acid residues within the constant regions to alter FcgR affinity and selectivity.

[0406] The binding of antibodies to Fc gamma receptors (FcγRs or FcgRs) was studied using biosensor technologies including Biacore surface plasmon resonance (SPR) and Fortebio Biolayer Interferometry (BLI). SPR studies were performed on a Biacore T100 instrument (GE Healthcare) at 25° C. The Fab fragment from a murine anti-6×His antibody was immobilized on a CM5 sensor chip using EDC/NHS to a density of ˜3000 RU. Various his-tagged FcgRs (7 ug/ml) were captured via the C-terminal his-tag using a contact time of 30 s at 10 ul/min, and the binding of 1.0 uM antibody was evaluated in a running buffer of 10 mM NaPO4, 130 mM NaCl, 0.05% p20 (PBS-T) pH 7.1. FcgRs used for these experiments included CD64 (FcgRI), CD32a-H131 (FcgRIIa-H131), CD32a-R131 (FcgRIIa-R131), CD32b (FcgRIIb), CD16a-V158 (FcgRIIIa-V158), CD16b-NA1 (FcgRIIIb-NA1), and CD16B-NA2 (FcgRIIIb-NA2). BLI experiments were performed on a Fortebio Octet RED instrument (Pall, Fortebio) at 25° C. in 10 mM NaPO4, 130 mM NaCl, 0.05% p20 (PBS-T) pH 7.1. Antibodies were captured out of undiluted expression supernatants on protein A coated sensors, followed by the binding of 1 uM hCD32a-H131, hCD32a-R131, hCD32b, hCD16a-V158, or 0.1 uM hCD64 analytes.

[0407] First, antibodies binding to various targets were made that contain modified IgG1 Fc domains including the substitutions S267E (SE) and S267E/L328F (SELF), as well as various combinations of the mutations P238D, P271G, H268D, A330R, G237D, E233D, referred to as V4, V7, V8, V9 and V12. The binding of these antibodies was studied by Biacore SPR with comparison to IgG1f, IgG2.3 (IgG2-C219S) and IgG4.1 (IgG4-5228P) antibodies, as well as an IgG1.1f antibody which has been engineered to reduce binding to all FcgRs. The results, which are shown in FIG. 12, demonstrate the expected FcgR binding properties for IgG1f, IgG2.3 and IgG4.1 and the mutated IgG1 antibodies, including increased CD32a-H131, CD32a-R131 and CD32b binding for SE and SELF, as well as increased selectivity of the V4, V7, V8, V9 and V12 mutants for CD32b over CD32a-H131 and CD32a-R131, FIG. 12.

[0408] The next set of constructs were used to engineer effector function into the otherwise effector function negative IgG2 isotype. For this study, the mutations described above were introduced in the context of IgG2.3 constant region, or an IgG2.3/IgG1f hybrid termed IgG2.3G1-AY, Table 19. Antibodies were expressed at small scale as supernatants, and tested for binding to FcgRs using Fortebio Octet BioLayer Interferometry biosensor technology. Since the antibodies were present at low concentration in the supernatants, the experiment was performed by capturing antibodies out of the supernatants using protein A coated sensors, followed by binding of FcgR analytes in solution. Purified and supernatant control IgG1f including wild type IgG1, SE, P238D, V4 and V12 antibodies were also included for comparison, and each of these control antibodies demonstrated expected FcgR binding properties, FIG. 13. The IgG2.3 antibody also demonstrated the expected binding profile, with appreciable binding to only CD32a-H131. However, all mutations to introduce S267E, L328F, P238D, P271G, H268D, A330R, G237D, or E233D mutations into IgG2.3 failed to recapitulate the FcgR affinity of the corresponding engineered IgG1 mAbs, FIG. 13. In contrast, the IgG2.3G1-AY construct was able to fully preserve the FcgR binding properties of wild type IgG1, while retaining the CH1 and hinge regions of IgG2.3. In addition, all IgG2.3G1-AY mutants containing S267E, L328F, P238D, P271G, H268D, A330R, G237D, and E233D demonstrated FcgR binding properties comparable to the IgG1 version mAbs containing the same mutations, FIG. 13. This demonstrates the successful engineering of antibodies with CH1 and hinge regions of IgG2 combined with effector function of wild type or mutant IgG1.

TABLE 19
Engineered IgG2 constructs

| Set | ID | Construct | Seq ID# |
|---|---|---|---|
| 1 | IgG2.3 | hHC-IgG2-C219S | |
| | IgG2.3-V13 | hHC-IgG2-C219S-P238D | |
| | IgG2.3-V14 | hHC-IgG2-C219S-P238D, | |
| | | P271G | |
| | IgG2.3-V15 | hHC-IgG2-C219S-P238D, | |
| | | H268D, P271G | |
| | IgG2.3-V16 | hHC-IgG2-C219S-P238D, | |
| | | P271G, A330R | |
| | IgG2.3-V17 | hHC-IgG2-C219S-P238D, | |
| | | H268D, P271G, A330R | |
| | IgG2.3-V18 | hHC-IgG2-C219S-S267E | |
| | IgG2.3-V19 | hHC-IgG2-C219S-S267E, | |
| | | L328F | |
| 2 | IgG2.3G1 | hHC-IgG2-C219S/hHC-IgG1f | |
| | IgG2.3G1- | hHC-IgG2-C219S/hHC-IgG1f- | |
| | AY-V20 | P238D | |
| | IgG2.3G1- | hHC-IgG2-C219S/hHC-IgG1f - | |
| | AY-V21 | P238D, P271G | |
| | IgG2.3G1- | hHC-IgG2-C219S/hHC-IgG1f- | |
| | AY-V22 | P238D, H268D, P271G | |
| | IgG2.3G1- | hHC-IgG2-C219S/hHC-IgG1f- | |
| | AY-V23 | P238D, P271G, A330R | |
| | IgG2.3G1- | hHC-IgG2-C219S/hHC-IgG1f- | |
| | AY-V24 | P238D, H268D, P271G, A330R | |
| | IgG2.3G1- | hHC-IgG2-C219S/hHC-IgG1f- | |
| | AY-V25 | G237D, P238D, H268D, | |
| | | P271G, A330R | |
| | IgG2.3G1- | hHC-IgG2-C219S/hHC-IgG1f- | |
| | AY-V26 | E233D, G237D, P238D, | |
| | | H268D, P271G, A330R | |
| | IgG2.3G1- | hHC-IgG2-C219S/hHC-IgG1f- | |
| | AY-V27 | S267E | |
| | IgG2.3G1- | hHC-IgG2-C219S/hHC-IgG1f- | |
| | AY-V28 | S267E, L328F | |

[0409] This engineering strategy was further explored by producing other antibodies formatted with IgG2.3G1-AY, IgG2.3G1-AY-S267E (IgG2.3G1-AY-V27), as well as IgG2-B-form variants (IgG2.5G1-AY and IgG2.5G1-AY-V27), and other hybrid antibodies containing different combinations of IgG1 and IgG2 constant domains, and testing the binding of these antibodies to anti-his Fab captured his-tagged FcgRs using Biacore SPR technology. In agreement with the Octet supernatant data, the SPR data showed that the IgG2.3G1-AY and IgG2.3G1-AY-V27 antibodies had comparable FcgR binding properties to IgG1f and IgG1f-S267E respectively, despite containing the CH1 and hinge regions of an A-form IgG2 antibody (IgG2.3) (FIGS. 14A and B and Table 20). Similar data was also obtained using IgG2.5G1-AY and IgG2.5G1-AY-V27 antibodies, demonstrating the successful engineering of B-form IgG2 antibodies (containing C131S mutation termed IgG2.5) having IgG1f or modified IgG1f like effector functions. Data for several other antibodies with IgG2.3G1-AY, IgG2.3G1-AY-V27, IgG2.5G1-AY, or IgG2.5G1-AY-V27 constant regions but different variable regions shows that this engineering strategy is broadly applicable to other antibodies independent of the variable domains (FIGS. 14A and B and Table 20). Other constructs that demonstrate IgG1f-like FcgR binding properties are IgG1-G2.3G1-AY, and IgG1deltaTHT, whereas several of the modified constant region constructs were unable to retain IgG1f-like FcgR binding properties, including IgG2.3G1-KH, IgG2.5G1-KH, IgG2.3plusTHT, IgG2.5plusTHT and IgG2.3plusGGG constructs, (FIGS. 14A and B and Table 20).

TABLE 20
% Rmax values for 1 uM antibodies binding to
anti-his Fab captured FcgR-his proteins

| | | hCD32a- | hCD32a- | | hCD16a- | hCD16B- |
|---|---|---|---|---|---|---|
| mAb | hCD64 | H131 | R131 | hCD32b | V158 | NA2 |
| mAb8-IgG1f | 80% | 82% | 51% | 27% | 51% | 21% |
| mAb9-IgG1f | 70% | 33% | 19% | 4% | 28% | 10% |
| CD73.4-IgG1f | 65% | 46% | 26% | 6% | 43% | 17% |
| GITR.6-IgG1f | 66% | 35% | 25% | 8% | 41% | 19% |
| CD73.4-IgG1.1f | 2% | 0% | 2% | 1% | 0% | 0% |
| GITR.6-IgG1.1f | 2% | 0% | 3% | 1% | 0% | 0% |
| mAb11-IgG2.3 | 2% | 44% | 17% | 5% | 1% | 0% |
| CD73.4-IgG2.3 | 3% | 48% | 11% | 1% | 1% | 0% |
| mAb6-IgG2.3 | 3% | 66% | 14% | 3% | 1% | 0% |
| GITR.6-IgG2.3 | 4% | 40% | 10% | 1% | 2% | 0% |
| mAb4-IgG2.3 | 1% | 39% | 6% | 1% | 1% | 0% |
| mAb5-IgG2.3 | 6% | 100% | 30% | 4% | 3% | 0% |
| mAb12-IgG2.3 | 2% | 39% | 7% | 1% | 1% | 0% |
| mAb13-IgG2.3 | 2% | 40% | 7% | 1% | 1% | 0% |
| mAb11-IgG2.5 | 0% | 40% | 13% | 3% | 0% | −1% |
| mAb7-IgG2.5 | 4% | 72% | 19% | 2% | 2% | 0% |
| mAb8-IgG2.5 | 3% | 59% | 14% | 3% | 2% | 0% |
| mAb10-IgG2.5 | 1% | 29% | 5% | 1% | 1% | 0% |
| CD73.4-IgG2.5 | 3% | 40% | 7% | 1% | 1% | 0% |
| mAb6-IgG2.5 | 3% | 75% | 17% | 4% | 2% | 0% |
| GITR.6-IgG2.5 | 4% | 43% | 13% | 2% | 2% | 1% |
| mAb4-IgG2.5 | 2% | 46% | 8% | 1% | 1% | 0% |
| mAb5-IgG2.5 | 6% | 89% | 26% | 5% | 4% | 1% |
| mAbl2-IgG2.5 | 1% | 36% | 6% | 1% | 1% | 0% |
| mAbl3-IgG2.5 | −2% | 39% | 4% | −2% | 0% | −2% |
| mAb8-IgG2.3G1-AY | 77% | 61% | 38% | 10% | 38% | 13% |
| mAb10-IgG2.3G1-AY | 67% | 23% | 14% | 4% | 24% | 8% |
| CD73.4-IgG2.3G1-AY | 65% | 38% | 20% | 5% | 38% | 14% |
| GITR.6-IgG2.3G1-AY | 66% | 43% | 33% | 16% | 42% | 21% |
| mAb7-IgG2.5G1-AY | 80% | 73% | 45% | 12% | 47% | 19% |
| mAb8-IgG2.5G1-AY | 77% | 70% | 45% | 17% | 48% | 22% |
| CD73.4-IgG2.5G1-AY | 65% | 43% | 24% | 7% | 40% | 16% |
| GITR.6-IgG2.5G1-AY | 65% | 38% | 27% | 10% | 41% | 19% |
| CD73.4-IgG2.3G1-KH | 2% | 15% | 2% | 0% | 2% | 0% |
| GITR.6-IgG2.3G1-KH | 3% | 13% | 3% | 0% | 3% | 1% |
| CD73.4-IgG2.5G1-KH | 2% | 17% | 2% | 0% | 3% | 0% |
| GITR.6-IgG2.5G1-KH | 2% | 15% | 3% | 0% | 3% | 1% |
| CD73.4-IgG2.3G1.1f-KH | 1% | 10% | 1% | 0% | 1% | 0% |
| GITR.6-IgG2.3G1.1f-KH | 2% | 9% | 2% | 0% | 1% | 0% |
| CD73.4-IgG2.5G1.1f-KH | 1% | 6% | 1% | 0% | 1% | 0% |
| GITR.6-IgG2.5G1.1f-KH | 3% | 15% | 4% | 0% | 2% | 0% |
| mAb7-IgG2.3G1-AY-V27 | 84% | 68% | 92% | 76% | 26% | 7% |
| mAb8-IgG2.3G1-AY-V27 | 78% | 67% | 80% | 67% | 24% | 7% |
| mAb10-IgG2.3G1-AY-V27 | 69% | 24% | 57% | 40% | 12% | 3% |
| mAb7-IgG2.5G1-AY-V27 | 81% | 74% | 89% | 84% | 32% | 9% |
| mAb8-IgG2.5G1-AY-V27 | 77% | 76% | 79% | 77% | 33% | 10% |
| CD73.4-IgG1-G2.3G1-AY | 66% | 50% | 31% | 10% | 48% | 23% |
| GITR.6-IgG1-G2.3G1-AY | 66% | 36% | 25% | 7% | 42% | 19% |
| CD73.4-IgG1-G2.3G1-KH | 2% | 18% | 2% | 0% | 4% | 1% |
| GITR.6-IgG1-G2.3G1-KH | 2% | 21% | 2% | 0% | 5% | 1% |
| CD73.4-IgG1deltaTHT | 65% | 43% | 23% | 6% | 42% | 17% |
| GITR.6-IgG1deltaTHT | 66% | 57% | 42% | 17% | 48% | 27% |
| CD73.4-IgG2.3plusTHT | 3% | 42% | 8% | 1% | 1% | 0% |
| GITR.6-IgG2.3plusTHT | 6% | 45% | 17% | 2% | 3% | 1% |
| CD73.4-IgG2.5plusTHT | 2% | 34% | 7% | 1% | 1% | 0% |
| GITR.6-IgG2.5plusTHT | 5% | 44% | 15% | 2% | 3% | 1% |
| CD73.4-IgG2.3plusGGG | 3% | 43% | 8% | 1% | 1% | 0% |
| GITR.6-IgG2.3plusGGG | 6% | 45% | 17% | 2% | 3% | 1% |

Taken together these data show that the sequence immediately C-terminal to the conserved CPPCPAP motif in the hinge region confers FcgR-mediated effector function, whereas the CH1 and upper portions of the hinge of the antibody can be replaced with IgG2 or modified IgG2 sequences, to potentially combine the effector functions of IgG1 and modified IgG1 with the superior internalization or signaling properties of antibodies containing IgG2 CH1 and/or hinge regions.

### Example 9: GITR Agonist Ab Internalization is Enhanced in Antibodies Having an IgG2 Hinge and CH1 Domain

[0410] To induce GITR expression, cells were incubated for 72h at 37° C. with 20 ng/ml anti-CD3+1000 ng/ml CD28. As an alternate method of T-cell activation, large batches of activated CD4⁺ T-cells were prepared by a three stage culture protocol. Briefly, CD4⁺ T-cells were stimulated with plate bound CD3 (1.5 ug/ml) supplemented with 1 ug/ml soluble CD28 for 72h at 37° C., expanded in culture for 14 days in the presence of 20 u/ml IL2 and finally exposed to another round of activation by addition of 10 ug/ml PHA, 2u/ml IL2 and 1 ug/ml CD28 for 72h at 37° C. Stimulated T cells were seeded into 384 well PDL imaging plates for 2h to adhere the cells, cooled for 15 min at 4° C., and then alexa 488 labeled GITR antibodies were added separately for 1h. Plates were finally imaged by HCS and the data were reported as total intensity per cell.

[0411] Three different GITR antibodies have been evaluated using the above mentioned T cell activation methods. They are GITR.6 antibody as a G1 isotype and an inert (IgG1.1) isotype unable to bind to Fc receptors, as well as a chimera with the IgG2 hinge in place of the IgG1 hinge.

[0412] GITR antibody induced internalization was assessed in CD3 stimulated CD4+ T-cells using the alexa quench assay format. Freshly obtained CD4 positive T cells were incubated under as described above to induce GITR expression. After stimulation, cells were resuspended into fresh media and plated for internalization assays as follows. Cells were incubated with antibody as described above, washed with warm media and incubated at 37° C. for the indicated times prior to fixation and quenching. Internalized antibody was measured as increased fluorescence above the small unquenchable signal observed at time zero and then normalized against the total fluorescence “unquenched control” initially bound to the cells. As shown in FIG. 15, GITR ligation resulted in rapid internalization peaking between 30-60 minutes for each antibody tested while control antibodies were found to maintain localization to the plasma membrane. The results indicate that the IgG2 hinge region enhances GITR ligation induced internalization.

[0413] To further dissect the detailed mechanisms of internalization and associated dynamics, antibody endocytosis and delivery into early endosome compartments was analyzed. In this experiment, cells were subjected to pulse chase analysis with unlabeled antibodies. Upon fixation, cells were permeabilized and stained for the early endosome marker EEA1 (cell signaling technology), washed and then detected with alexa fluor-488 conjugated anti-rabbit secondary antibody (EEA1) and alexa fluor-647 conjugated anti-human antibody (GITR). Plates were imaged on an Opera confocal system with a 60× water immersion objective. The results indicated clear segregation between the membrane bound anti-GITR antibody staining and intracellular EEA1 signal. Upon warming the cultures, clustering for some antibodies was detected that appears to co-localize with endosomal proteins. Quantification of endosomal co-localization was performed using HCS Studio Software and the results are plotted as the ratio of colocalized pixel intensity relative to total staining (FIG. 16). The colocalization of GITR antibody and early endosome is most prominent at 30 minutes. At this tested time point, GITR.6. G2. G1f showed a higher fraction colocalized than the GITR.6. G1f antibody. The colocalization results correlate with the observations made using the alexa quenching method described above and support a model suggesting the G2 hinge has potential advantage over G1 for inducing GITR internalization.

### Example 10: GITR agonist Ab signaling in T cell receptor activated CD4+ and CD8+ T cells is enhanced in antibodies having an IgG2 hinge and CH1 domain

[0414] To further investigate the mechanisms for anti-GITR agonist antibodies, several signaling pathways involved in T cell activation, such as NFkB and P38 signaling pathways, were monitored.

[0415] CD4+ and CD8+ T cells from a healthy donor (M6576) were activated with plate-coated 0.4 μg/ml anti-CD3 and 0.4 □g/ml anti-CD28. After 3 days, cells were collected and plated onto 384-well image plates for signaling activation. After cells settled in the plate for 2 hours, they were treated with GITR antibodies for 15 minutes and the signaling events were terminated by adding formaldehyde to a final of 10% into the assays plate. Then the cells were permeabilized and stained with phosphor-p65 NFKB antibody for signaling detection. As shown in FIG. 17, GITR.6. G2 and GITR.6. G2. G1f antibodies had higher signaling responses compared to the GITR.6. G1f in both CD4+ and CD8+ T cells. Although there is no direct evidence of linking internalization and signaling pathway activation, it is intriguing to note that G2 isotype seems to improve both aspects of antibody functional activities compared to the IgG1 for GITR.6.

[0416] To quantify the signaling activities for each antibody, both EC50 and Emax for each antibody were calculated, since both parameters are critical to capture the full extent of the signaling event. The response level of GITR.6. G2. G1f is chosen to be the 100% control, and all other antibodies were normalized against it. As shown in Table 21 for both CD4+ and CD8+ T cell populations activated by anti-CD3 and anti-CD28 antibodies, there were a range of activities for GITR antibodies in terms of both potency (EC50s) and efficacy (Emax %). Although GITR.6. G2, GITR.6. G2. G1f and GITR.6. G1f showed similar potencies (EC50s) around 10 nM range, the efficacy (Emax) was quite different for different isotypes, suggesting G1 antibody does not signal as effectively as the G2 or chimeric isotypes.

TABLE 21
Summary of the GITR HuMab NFKB Signaling
activities in TCR Activated CD4+ and CD8+ T Cells

| | CD4+ T cells | | CD8+ T cells | |
|---|---|---|---|---|
| | EC50 | Emax | EC50 | Emax |
| Antibody | (nM) | (%) | (nM) | (%) |
| GITR.6.G2 | 12.8 | 69 | 9.00 | 85 |
| GITR.6.G2.Gif | 9.00 | 100 | 3.77 | 92 |
| GITR.6.Gif | 7.3 | 10.8 | 20.05 | 27 |
| hIgG1 Isotype | Inactive | 4 | Inactive | 6 |
| Control | | | | |

[0417] To further confirm if the signaling difference of GITR.6. G2 and GITR.6. G2. G1f compared to GITR.6. G1f is limited to NFkB signaling only or if it holds true for other signaling events as well, a P38MAPK signaling readout was explored. As shown in FIG. 18, GITR.6. G2 and GITR.6. G2. G1f antibodies had higher signaling responses compared to the GITR.6. G1f antibody in a CD4+ cell p38 MAPK activation assay. Therefore the better signaling activities for GITR.6 G2 isotype compared with G1 isotype is not only limited to NFkB signaling.

[0418] In addition to enhanced agonist activity and internalization, it was also shown that modified heavy chain constant regions can impart enhanced ADCC (to, e.g., an agonist of a stimulatory receptor), as well as provide a new activity to an antibody. For example, it was found that changing the constant heavy chain domain of an antibody that binds to an inhibitory cell surface molecule and prevents the inhibitory activity of the cell surface molecule (an antagonist) to a modified heavy chain constant region described herein, resulted in the antibody losing its ability to be an antagonist, and instead endowed it with agonist activity (of the inhibitory activity).

### Example 11: Confirmation of Disulfide Bonds of IgG2.3 and IgG2.5 Constructs

[0419] The disulfide bond structures in an antibody comprising the constant domain IgG2.3 (A form), IgG2.3G1 (A form) and IgG2.5 (B-form) were confirmed to be correct by comparison of non-reduced to reduced Lys-C digests.

[0420] The antibody samples were digested with Lys-C which specifically cleaves peptide bonds on the carboxyl-terminal side of Lysine (K, Lys) residues. Peptides in the digest were separated using a Waters ACQUITY BEH C18 column, 1.7 μm, 2.1×150 mm, reverse phase HPLC column and detected with an ultraviolet (UV) detector at 214 nm and Thermo LTQ mass spectrometer.

[0421] Lys-C enzymatic digestion and reduction of disulfide bonds: To a vial containing 100 μg of the antibody sample, 1204, denature buffer was added, resulting in a 3.7M GuHCl, 0.2M Tris pH 7.0 solution. The mixture was incubated at 55° C. for 30 minutes. Alkylation of protein was done by adding 1 μl 50 mM Iodoacetamide in the above solution, then incubation in the dark at room temperature for 30 minutes. Alkylated sample was diluted with 804, dH2O and Waco Lys-C was added at enzyme to substrate ratio as 1:10. The antibodies were digested overnight in the dark at room temperature. After digestion, a 100 μL aliquot was removed from the Lys-C digested sample and 104, of 0.5M DTT was added in. This sample was incubated at room temperature for 1 hour to reduce the disulfide bonds.

[0422] The results obtained are as follows:

[0423] Disulfide structure of the IgG2.3 and IgG2.3G1 antibodies (A form): Within the Fab region of the heavy chain Cys22 (H) is linked to Cys98 (H) and Cys151 (H) is linked to Cys 207 (H). Within the Fc region of the heavy chain Cys265 (H) is linked to Cys325 (H) and Cys371 (H) is linked to Cys429 (H). Within the Fab region of the light chain Cys23 (L) is linked to Cys88 (L) and Cys134 (L) is linked to Cys194 (L). The C-terminal of light chain Cys214 (L) is linked to the heavy chain at Cys138 (H). The hinge region of the heavy chain contains three cysteine residues Cys227 (H), Cys230 (H) and Cys233 (H), which provide three inter-chain disulfide bonds. The most likely linkage is Cys227 (H) to Cys227 (H), Cys230 (H) to Cys230 (H) and Cys233 (H) to Cys233 (H) which is the correct theoretical disulfide arrangement of IgG2 A form.

[0424] Disulfide structure of the IgG2.5 antibody (B form): Within the Fab region of the heavy chain Cys22 (H) is linked to Cys98 (H) and Cys151 (H) is linked to Cys 207 (H). Within the Fc region of the heavy chain Cys264 (H) is linked to Cys324 (H) and Cys370 (H) is linked to Cys428 (H). Within the Fab region of the light chain Cys23 (L) is linked to Cys88 (L) and Cys134 (L) is linked to Cys194 (L). The hinge region of the heavy chain contains four cysteine residues Cys226 (H), Cys227 (H), Cys230 (H) and Cys233 (H). The C-terminal of light chain Cys214 (L) is linked to a cysteine residue of heavy chain in the hinge region, and rest three cysteine residues provide three inter-chain disulfide bonds. The most likely linkage is Cys214 (L) to Cys226 (H), then Cys227 (H) to Cys227 (H), Cys230 (H) to Cys230 (H) and Cys233 (H) to Cys233 (H), which is the correct theoretical disulfide arrangement of IgG2 B form. Additionally, the disulfide linkages in the hinge region were confirmed using electron transfer dissociation (ETD) triggered tandem mass spectrometry using an ion trap mass spectrometer.

### Example 12: Relevance of Certain Amino Acid Residues in IgG2 CH1 and Hinge in Improving GITR Agonism on T Cells

[0425] Anti-GITR antibodies (GITR.6) with the heavy chain constant regions shown in Table 17 were prepared and tested in IL-2 production assays as described in Example 2, but in which supernatants were harvested at 40 hours rather than 48 hours.

[0426] The results, which are shown in FIG. 20A-D, were largely in agreement with the CD73 internalization results (see FIG. 10) obtained with anti-CD73 antibodies having the same heavy chain constant regions as those used in this Example.

### Example 13: Elimination of Effector Functions with a P238K Mutation

[0427] Variable regions of an antibody were fused to an IgG1 Fc that differs from a wild type IgG1 Fc in a single amino acid residue: P238K (SEQ ID NO: 198). With this single mutation, the antibody demonstrated a lack of effector function, having essentially no detectable binding signal towards the low affinity Fc√Rs hCD32a-H131, hCD32a-R131, hCD32b, hCD16a-V158 or hCD16b-NA2 (see data in Example 14). In addition, the antibody with IgG1 P238K showed significant reduction in binding affinity to the high affinity Fc√R CD64 (see data in Example 14). Binding of the antibody to CD64 demonstrated a faster off-rate (dissociation constant) relative to antibodies with a wild type IgG1 constant domain.

[0428] The lack of effector function of an IgG1 Fc having a P238K mutation (SEQ ID NO: 198) was also demonstrated with an antibody variant.

[0429] Thus, a human IgG1 Fc with a single mutation (P238K), e.g., wherein the heavy chain constant region comprises the amino acid sequence SEQ ID NO: 198, can be used in any antibodies in which the effector functions are not desirable.

### Example 14: Elimination of Effector Functions with a P238K and Additional Mutations

[0430] Additional antibodies were generated with Fcs having mutation(s) to further reduce effector function, preferably both ADCC and CDC. Mutants were generated to further reduce FcR binding as shown in Table 22. In particular, as shown above, P238K eliminates detectable FcR binding except to CD64, so the goal was to combine P238K with additional mutations to reduce CD64 binding. Mutations were tested in the context of IgG1 isotype, IgG2.3 and IgG2.5 isotype and IgG2.3G1 isotype formats. The Fcs used in these antibodies comprise one of the amino acid sequences having SEQ ID NOs: 234-245 and 247-262.

[0431] The location of the mutations is shown in FIG. 21.

[0432] The binding of human FcγRs to antibodies was studied by surface plasmon resonance using a Biacore 8K system (GE Healthcare). For these studies, protein A was immobilized on flow cells 1-4 of the CM5 sensor chip using standard ethyl (dimethylaminopropyl) carbodiimide (EDC)/N-hydroxysuccinimide (NETS) chemistry, with ethanolamine blocking, in a running buffer of 10 mM HEPES pH 7.4, 150 mM NaCl, 3 mM EDTA, 0.05% surfactant p20, to a density of ˜3000 RU. Purified antibodies (10 μg/mL) or expression supernatants (diluted to ˜10 ug/ml) were captured on the protein A surface to a density of ˜1000-1200 RU, and the binding of FcγR analytes was tested in running buffer consisting of 10 mM NaPO4, 130 mM NaCl, 0.05% p20, buffer (PBS-T) pH 7.1 at 25° C., using 120 s association time and 120 s dissociation time at a flow rate of 20 μL/min. The data were analyzed using Biacore 8K evaluation software, by determining the measured binding response as a percentage of theoretical maximum binding response for each antibody (% Rmax), based on the level of captured antibody, assuming 100% fractional activity and only taking into account protein mass without glycosylation, as follows. T compare the FcgR binding of different molecules, the SPR binding data was analyzed by calculating the maximum binding response as a percentage of the theoretical maximum binding response (% Rmax) as generally shown in Eq. 1:

$$\% R max = \frac{( Observed Binding Response Analyte )}{( Theoretical Maximum Binding Response Analyte )} \qquad Eq . 1$$

[0433] Specifically, the % Rmax was calculated using the equation:

$$\% R max = \frac{( Binding Response Analyte )}{\begin{matrix}\frac{( Mw Analyte )}{( Mw Ligand )} \times ( Response Ligand ) \times \\ ( analyte \text{:} ligand stoichiometry )\end{matrix}} \qquad Eq . 2$$

where “Analyte” is the antibody and “Ligand” is the captured FcgR protein. This analysis does not take into account the mass of glycosylation of antibody or FcgR, and assumes 100% fractional activity for the captured ligand.

[0434] The “% Rmax analysis” is particularly useful for evaluating the binding of the “low affinity” FcgRs, e.g., hCD32a-H131, hCD32a-R131, hCD32b, hCD16a-V158, hCD16a-F158, hCD16b-NA1, and hCD16b-NA2, which have relatively fast association and dissociation rates and affinities near or below the analyte concentration tested (1 micromolar (μM)), so saturation of the surface is generally not achieved under these conditions. In contrast, the “high affinity” FcgR hCD64 binds with higher affinity and slower dissociation kinetics than the other FcgRs, particularly to IgG1 and IgG4, and thus these isotypes do typically saturate the hCD64 surface under micromolar analyte concentrations, and are more difficult to differentiate affinities using % Rmax. For these interactions, differences between antibodies can be easily observed by comparison of the dissociation rates in the sensorgram data.

[0435] The results are shown in Table 22 and exemplary sensorgram data are provided in FIG. 21 A-L.

TABLE 22
Binding of antibodies with wild-type or mutated Fcs to FcγRs shown as percentage of Rmax

| | | | 10 uM | 10 uM | | 10 uM | 10 uM | 0.1 | 1 uM | 1 uM | | 1 uM | 1 uM |
|---|---|---|---|---|---|---|---|---|---|---|---|---|---|
| Anti- | | 1 uM | hCD32a- | hCD32a- | 10 uM | hCD16a- | hCD16a- | uM | hCD32a- | hCD32a- | 1 uM | hCD16a- | hCD16a- |
| body | Sample | hCD64 | H131 | R131 | hCD32b | V158 | F158 | hCD64 | H131 | R131 | hCD32b | V158 | F158 |
| Ab1-hIgG1f | Purified | 126% | 98% | 93% | 61% | 116% | 45% | 126% | 54% | 43% | 13% | 81% | 10% |
| Ab2-hIgG1f | Purified | 123% | 98% | 96% | 73% | 116% | 65% | 124% | 65% | 56% | 20% | 94% | 17% |
| Ab1-NF | Purified | 125% | 97% | 98% | 76% | 124% | 130% | 125% | 55% | 59% | 22% | 123% | 104% |
| Ab33-IgG2.3 | Purified | 16% | 100% | 69% | 29% | 27% | 4% | 2% | 60% | 21% | 7% | 6% | 2% |
| Ab4-hz1-P238K | Purified | 116% | 0% | 1% | 1% | −1% | −1% | 88% | 0% | 0% | 0% | 0% | 0% |
| Ab2-IgG1.3f-P238K | supernatant | 1% | 1% | 3% | 2% | 0% | 0% | 0% | 1% | 1% | 1% | 0% | 0% |
| Ab2-IgG1f-P238K | supernatant | 109% | −3% | −2% | −2% | −4% | −4% | 89% | 1% | 1% | 1% | 0% | 0% |
| Ab2-IgG1f-L235E-P238K | supernatant | 11% | 1% | 3% | 3% | 0% | −1% | 2% | 0% | 1% | 1% | 0% | 0% |
| Ab2-IgG1f-L235E- | supernatant | 11% | 2% | 5% | 3% | 0% | 0% | 2% | 1% | 1% | 1% | 1% | 0% |
| P238K-K322A | | | | | | | | | | | | | |
| Ab2-IgG2.3G1.3f-P238K | supernatant | 2% | 1% | 3% | 1% | 0% | 0% | 0% | 0% | 1% | 1% | 0% | 0% |
| Ab2-IgG2.3G1-L235E-P238K | supernatant | 16% | 1% | 4% | 3% | 1% | 0% | 2% | 1% | 1% | 1% | 1% | 1% |
| Ab2-IgG2.3G1-L235E- | supernatant | 16% | 2% | 5% | 3% | 0% | 0% | 2% | 1% | 1% | 1% | 1% | 0% |
| P238K-K322A | | | | | | | | | | | | | |
| Ab2-IgG2.5G1.3f-P238K | supernatant | 2% | 1% | 3% | 2% | 0% | 0% | 0% | 1% | 1% | 1% | 1% | 1% |
| Ab2-IgG2.5G1-L235E- | supernatant | 15% | 2% | 5% | 3% | 0% | 0% | 2% | 1% | 1% | 1% | 1% | 1% |
| P238K-K322A | | | | | | | | | | | | | |
| Ab4-IgG1fa | supernatant | 124% | 99% | 95% | 71% | 116% | 59% | 125% | 63% | 53% | 19% | 91% | 15% |
| Ab4-IgG1.3fa | supernatant | 7% | 2% | 29% | 17% | 4% | 1% | 1% | 0% | 4% | 2% | 1% | 0% |
| Ab4-IgG1fa-P238K | supernatant | 116% | 1% | 1% | 1% | 0% | 0% | 87% | 1% | 1% | 1% | 0% | 0% |
| Ab4-IgG1fa-L235A-P238K | supernatant | 51% | 0% | 1% | 0% | −1% | −1% | 10% | 0% | 0% | 0% | 0% | 0% |
| Ab4-IgG1fa-L235E-P238K | supernatant | 9% | 0% | 3% | 2% | 0% | 0% | 1% | 0% | 1% | 1% | 0% | 0% |
| Ab4-IgG1.3fa-P238K | supernatant | 1% | 0% | 2% | 1% | 0% | −1% | 0% | 0% | 1% | 0% | 0% | 0% |
| Ab4-IgG1fa-L235E- | supernatant | 11% | 1% | 4% | 1% | −1% | −1% | 2% | 0% | 1% | 0% | 0% | 0% |
| P238K-K322A | | | | | | | | | | | | | |
| Ab4-IgG2.3 | supernatant | 16% | 98% | 73% | 31% | 34% | 4% | 2% | 66% | 23% | 6% | 7% | 2% |
| Ab4-IgG2.3-P238K | supernatant | 1% | 1% | 2% | 1% | 0% | 0% | 0% | 2% | 2% | 2% | 1% | 1% |
| Ab4-IgG2.3G1 | supernatant | 123% | 95% | 93% | 72% | 113% | 62% | 123% | 62% | 55% | 21% | 90% | 16% |
| Ab4-IgG2.3G1-P238K | supernatant | 116% | 0% | 1% | 1% | −1% | −2% | 91% | 0% | 0% | 0% | 0% | −1% |
| Ab4-IgG2.5G1-P238K | supernatant | 118% | 1% | 2% | 2% | 0% | 0% | 94% | 1% | 1% | 1% | 1% | 1% |
| Ab4-IgG2.3G1-L235E-P238K | supernatant | 13% | 0% | 3% | 3% | 0% | 0% | 2% | 0% | 1% | 1% | 0% | 0% |

[0436] As shown in Table 22 and in FIG. 22, the combination mutants demonstrated very weak FcR binding. Addition of L235 mutations to P238K isotype reduced CD64 binding to similar levels as IgG1.3f. L235E was superior to L235A mutation for reducing CD64 binding. Adding the P238K mutation to IgG2 (IgG2.3-P238K) resulted in a fully inert isotype, demonstrating no detectable binding to any of the FcR proteins. The mutations also showed similar trends in the context of IgG1 and IgG2.xG1 formats. K322A mutation, which reduce c1q binding (CDC activity), and was added in some constructs, had minimal impact on FcR binding so not much effect of K322A was observed.

### Example 14: Elimination of Effector Functions with IgG1.3 Fc

[0437] This Example is described in Examples 2 and 3 of co-filed and co-owned PCT application entitled “MODIFIED IgG1 Fc DOMAINS AND ANTI-CD40 DOMAIN ANTIBODY FUSIONS THEREWITH.”

[0438] This Example shows that an antibody or polypeptide with an IgG1.3 Fc is essentially devoid of binding to CD16, CD32a, CD32b and CD64. This has also been observed when an IgG1.3 Fc was linked to the variable domain of anti-TIM3 antibodies (see WO2018/013818). IgG1.3 was derived from the “IgG1.1” Fc (“IgG1.1” is an IgG1 with L234A, L235E, G237A, A330S and P331S substitutions) by removing A330S and P331S, thereby retaining 3 of the 5 mutations, i.e., L234A, L235E, G237A. It was surprisingly discovered that the absence of A330S and P331S in the IgG1.1 Fc did not significantly affect the inertness of this Fc. Below are exemplary FcγR binding measurements of IgG1.1 and IgG1.3 (and other Fcs for comparative purposes) containing antibodies and fusion proteins, comparing the inertness of IgG1.1 and IgG1.3 in the context of an antibody as well as in the context of a non-antibody protein.

[0439] Materials and Methods used in this example include the following.

[0440] FcgR Binding SPR:

[0441] FcgR binding can be measured in vitro using purified FcγRs using Biacore™ surface plasmon resonance (SPR). Two methods were used herein.

[0442] One method tests the binding of purified antibodies or dAb-Fc proteins to His-tagged FcgR proteins (FcgR-His (“FcgR” is used interchangeably with “FcγR”) which are captured on the immobilized Fab fragment of an anti-His antibody. These experiments are performed on either a Biacore™ T100 or Biacore™ T200 instrument (GE Healthcare) at 25° C. The Fab fragment from a murine anti-6×His antibody (generated in house) is immobilized on a CM5 sensor chip using standard ethyl(dimethylaminopropyl) carbodiimide (EDC)/N-hydroxysuccinimide (NHS) chemistry with ethanolamine blocking, to a density of ˜3000 Resonance Units RU in a running buffer of 10 millimolar (mM) HEPES pH 7.4, 150 mM NaCl, 3 mM EDTA, 0.05% surfactant p20 (HBS-EP+). All remaining studies are performed using a running buffer of 10 mM NaPO4, 130 mM NaCl, 0.05% p20 (PBS-T) at pH 7.1. Various FcgR proteins containing a C-terminal 6× poly-histidine tag (generated in house) were captured on this surface (typically using FcgR-His protein concentration of ˜7 μg/ml) using a contact time of 30 seconds (s) at 10 μl/min. Various concentrations of purified antibody or dAb-Fc proteins are tested for binding, for example using an association time of 120 seconds at 30 μl/min, and a dissociation time of 120 seconds at 30 μl/min. FcgR proteins tested in these studies include the “high affinity” FcgR hCD64 (hFcgR1), as well as the “low affinity” FcgRs hCD32a-H131 (FcgRIIa-H131), hCD32a-R131 (FcgRIIa-R131), hCD32b (FcgRIIb), hCD16a-V158 (FcgRIIIa-V158), hCD16a-F158 (FcgRIIIa-F158), hCD16b-NA1 (FcgRIIIb-NA1), and hCD16b-NA2 (FcgRIIIb-NA2).

[0443] To quantitatively analyze the binding responses and compare the FcgR binding of different molecules, the SPR binding data can be analyzed by calculating the maximum binding response as a percentage of the theoretical maximum binding response (% Rmax) as generally shown in Eq. 1:

$$\% R max = \frac{( Observed Binding Response Analyte )}{( Theoretical Maximum Binding Response Analyte )} \qquad Eq . 1$$

Specifically, the % Rmax is calculated using the equation:

$$\% R max = \frac{( Binding Response Analyte )}{\begin{matrix}\frac{( Mw Analyte )}{( Mw Ligand )} \times ( Response Ligand ) \times \\ ( analyte \text{:} ligand stoichiometry )\end{matrix}} \qquad Eq . 2$$

where “Analyte” is the antibody or dAb-Fc and “Ligand” is the captured FcgR protein. This analysis does not take into account the mass of glycosylation of antibody, dAb-Fc or FcgR, and assumes 100% fractional activity for the captured ligand.

[0444] The “% Rmax analysis” is particularly useful for evaluating the binding of the “low affinity” FcgRs, e.g., hCD32a-H131, hCD32a-R131, hCD32b, hCD16a-V158, hCD16a-F158, hCD16b-NA1, and hCD16b-NA2, which have relatively fast association and dissociation rates and affinities near or below the analyte concentration tested (1 micromolar (μM)), so saturation of the surface is generally not achieved under these conditions. In contrast, the “high affinity” FcgR hCD64 binds with higher affinity and slower dissociation kinetics than the other FcgRs, particularly to IgG1 and IgG4, and thus these isotypes do typically saturate the hCD64 surface under micromolar analyte concentrations, and are more difficult to differentiate affinities using % Rmax. For these interactions, differences between antibodies can be easily observed by comparison of the dissociation rates in the sensorgram data.

[0445] A second SPR assay for testing the interaction between antibodies or dAb-Fc proteins with FcgR proteins is a protein A capture method. These experiments are also performed on either a Biacore™ T100 or Biacore™ T200 instrument (GE Healthcare) at 25° C. For these studies, protein A is immobilized on flow cells 1-4 of a CM5 sensor chip using standard ethyl (dimethylaminopropyl) carbodiimide (EDC)/N-hydroxysuccinimide (NHS) chemistry, with ethanolamine blocking, in a running buffer of 10 mM HEPES pH 7.4, 150 mM NaCl, 3 mM EDTA, 0.05% surfactant p20, to a density of −3000 RU. Antibody or dAb-Fc proteins (typically ˜3-10 μg/ml) are captured on the protein A surface, and the binding of FcgR analytes are tested in running buffer consisting of 10 mM NaPO4, 130 mM NaCl, 0.05% p20, buffer (PBS-T) at pH 7.1 and at 25° C., using for example, 120 sec association time and 180 sec dissociation time at a flow rate of 30 μL/min.

[0446] The protein A capture assay can also be used to analyze unpurified supernatants containing antibody or dAb-Fc molecules. For this analysis, the antibody or dAb-Fc proteins can be captured from either undiluted supernatants or supernatants diluted with running buffer. To quantitatively analyze the binding responses and compare the FcgR binding of different molecules, the SPR binding data can be analyzed by calculating the % Rmax using Eq. 1 above, wherein Analyte is the purified FcgR protein, and Ligand is the captured antibody or dAb-Fc protein.

[0447] In addition to % Rmax analysis, quantitative analysis of the kinetics and affinity of binding can be performed by testing a titration of FcgR analyte for binding to protein A captured antibodies or dAb-Fc proteins. For example, FcgR in a 3:1 serial dilution can be titrated from 10 μM down to either 0.15 nM (hCD64) or 1.5 nM (all other FcgRs). These kinetic data can be fit to either a 1:1 Langmuir model or to a steady-state binding model using Biacore™ T200 evaluation software to obtain kinetic and affinity values.

[0448] dAb-Fcs:

[0449] The dAb-Fcs studied in this example are shown in Table 23. In these sequences, the single variable domain 3h56-269 residues are amino acids 1-118 (underlined). The linker AST is double-underlined.

TABLE 23

| Seq # | Sample ID | Sequence |
|---|---|---|
| 263 | 3h56-269-IgG4.1 | EVQLLESGGGLVQPGGSLRLSCAASGFTFRDYEMWWVRQAPGKGLERVS |
| | OR | AINPQGTRTYYADSVKGRFTISRDNSKNTLYLQMNSLRAEDTAVYYCAK |
| | BMS-986090 | LPFRFSDRGQGTLVTVSSASTESKYGPPCPPCPAPEFLGGPSVFLFPPK |
| | | PKDTLMISRTPEVTCVVVDVSQEDPEVQFNWYVDGVEVHNAKTKPREEQ |
| | | FNSTYRVVSVLTVLHQDWLNGKEYKCKVSNKGLPSSIEKTISKAKGQPR |
| | | EPQVYTLPPSQEEMTKNQVSLTCLVKGFYPSDIAVEWESNGQPENNYKT |
| | | TPPVLDSDGSFFLYSRLTVDKSRWQEGNVFSCSVMHEALHNHYTQKSLS |
| | | LSLGK |
| 264 | 3h56-269-CT | EVQLLESGGGLVQPGGSLRLSCAASGFTFRDYEMWWVRQAPGKGLERVS |
| | | AINPQGTRTYYADSVKGRFTISRDNSKNTLYLQMNSLRAEDTAVYYCAK |
| | | LPFRFSDRGQGTLVTVSSASTEPKSSDKTHTSPPSPAPELLGGSSVFLF |
| | | PPKPKDTLMISRTPEVTCVVVDVSHEDPEVKFNWYVDGVEVHNAKTKPR |
| | | EEQYNSTYRVVSVLTVLHQDWLNGKEYKCKVSNKALPAPIEKTISKAKG |
| | | QPREPQVYTLPPSRDELTKNQVSLTCLVKGFYPSDIAVEWESNGQPENN |
| | | YKTTPPVLDSDGSFFLYSKLTVDKSRWQQGNVFSCSVMHEALHNHYTQK |
| | | SLSLSPGK |
| 265 | 3h56-269-IgG1.1f | EVQLLESGGGLVQPGGSLRLSCAASGFTFRDYEMWWVRQAPGKGLERVS |
| | | AINPQGTRTYYADSVKGRFTISRDNSKNTLYLQMNSLRAEDTAVYYCAK |
| | | LPFRFSDRGQGTLVTVSSASTEPKSCDKTHTCPPCPAPEAEGAPSVFLF |
| | | PPKPKDTLMISRTPEVTCVVVDVSHEDPEVKFNWYVDGVEVHNAKTKPR |
| | | EEQYNSTYRVVSVLTVLHQDWLNGKEYKCKVSNKALPSSIEKTISKAKG |
| | | QPREPQVYTLPPSREEMTKNQVSLTCLVKGFYPSDIAVEWESNGQPENN |
| | | YKTTPPVLDSDGSFFLYSKLTVDKSRWQQGNVFSCSVMHEALHNHYTQK |
| | | SLSLSPGK |
| 266 | 3h56-269-IgG1.3f | EVQLLESGGGLVQPGGSLRLSCAASGFTFRDYEMWWVRQAPGKGLERVS |
| | | AINPQGTRTYYADSVKGRFTISRDNSKNTLYLQMNSLRAEDTAVYYCAK |
| | | LPFRFSDRGQGTLVTVSSASTEPKSCDKTHTCPPCPAPEAEGAPSVFLF |
| | | PPKPKDTLMISRTPEVTCVVVDVSHEDPEVKFNWYVDGVEVHNAKTKPR |
| | | EEQYNSTYRVVSVLTVLHQDWLNGKEYKCKVSNKALPAPIEKTISKAKG |
| | | QPREPQVYTLPPSREEMTKNQVSLTCLVKGFYPSDIAVEWESNGQPENN |
| | | YKTTPPVLDSDGSFFLYSKLTVDKSRWQQGNVFSCSVMHEALHNHYTQK |
| | | SLSLSPGK |
| 267 | 3h56-269-IgG1-D265A | EVQLLESGGGLVQPGGSLRLSCAASGFTFRDYEMWWVRQAPGKGLERVS |
| | | AINPQGTRTYYADSVKGRFTISRDNSKNTLYLQMNSLRAEDTAVYYCAK |
| | | LPFRFSDRGQGTLVTVSSASTEPKSCDKTHTCPPCPAPELLGGPSVFLF |
| | | PPKPKDTLMISRTPEVTCVVVAVSHEDPEVKFNWYVDGVEVHNAKTKPR |
| | | EEQYNSTYRVVSVLTVLHQDWLNGKEYKCKVSNKALPAPIEKTISKAKG |
| | | QPREPQVYTLPPSREEMTKNQVSLTCLVKGFYPSDIAVEWESNGQPENN |
| | | YKTTPPVLDSDGSFFLYSKLTVDKSRWQQGNVFSCSVMHEALHNHYTQK |
| | | SLSLSPGK |

The sequences of IgG1.1f and IgG1.3f, each starting with “EPK” (i.e., the sequences in SEQ ID NOs: 77 and 78) that are shown in Table 23 are identical to the sequences starting at EPK in SEQ ID NOs 83 and 248, respectively.

### Control mAb:

[0450] A control monoclonal antibody (1F4) was also formatted with similar Fc domain mutations. The individual chain sequences are shown in Table 24, including the sequence (SEQ ID NO: 268) of the portion of the 1F4 heavy chain including the variable region and CH1 region. This sequence is underlined in the heavy chain sequences (SEQ ID NOs: 269-275). The pair of heavy chain and light chain sequences for each 1F4 mAb variant is shown in Table 25.

TABLE 24

| SEQ ID No. | Sequence identity | Sequence |
|---|---|---|
| 268 | 1F4 Heavy chain | EVQLLESGGGLVQPGGSLRLSCAASGFTFSIYAMSWVRQAPG |
| | variable region | KGLEWVSAISDSGGRTYFADSVRGRFTISRDNSKNTLSLQMN |
| | and CH1 | SLRAEDTAVYYCAKVDYSNYLFFDYWGQGTLVTVSSASTKGP |
| | | SVFPLAPSSKSTSGGTAALGCLVKDYFPEPVTVSWNSGALTS |
| | | GVHTFPAVLQSSGLYSLSSVVTVPSSSLGTQTYICNVNHKPS |
| | | NTKVDKRV |
| 269 | 1F4 Light chain | EIVLTQSPGTLSLSPGERATLSCRASQSISSSYLAWYQQKPG |
| | variable region | QAPRLLIYGASSRATGIPDRFSGSGSGTDFTLTISRLEPEDF |
| | and CL | AVYYCQQYGSSPYTFGQGTKLEIKRTVAAPSVFIFPPSDEQL |
| | | KSGTASVVCLLNNFYPREAKVQWKVDNALQSGNSQESVTEQD |
| | | SKDSTYSLSSTLTLSKADYEKHKVYACEVTHQGLSSPVTKSF |
| | | NRGEC |
| 270 | 1F1-IgG1f | EVQLLESGGGLVQPGGSLRLSCAASGFTFSIYAMSWVRQAPG |
| | heavy chain | KGLEWVSAISDSGGRTYFADSVRGRFTISRDNSKNTLSLQMN |
| | | SLRAEDTAVYYCAKVDYSNYLFFDYWGQGTLVTVSSASTKGP |
| | | SVFPLAPSSKSTSGGTAALGCLVKDYFPEPVTVSWNSGALTS |
| | | GVHTFPAVLQSSGLYSLSSVVTVPSSSLGTQTYICNVNHKPS |
| | | NTKVDKRVEPKSCDKTHTCPPCPAPELLGGPSVFLFPPKPKD |
| | | TLMISRTPEVTCVVVDVSHEDPEVKFNWYVDGVEVHNAKTKP |
| | | REEQYNSTYRVVSVLTVLHQDWLNGKEYKCKVSNKALPAPIE |
| | | KTISKAKGQPREPQVYTLPPSREEMTKNQVSLTCLVKGFYPS |
| | | DIAVEWESNGQPENNYKTTPPVLDSDGSFFLYSKLTVDKSRW |
| | | QQGNVFSCSVMHEALHNHYTQKSLSLSPGK |
| 271 | 1F4-IgG4.1 | EVQLLESGGGLVQPGGSLRLSCAASGFTFSIYAMSWVRQAPG |
| | heavy chain | KGLEWVSAISDSGGRTYFADSVRGRFTISRDNSKNTLSLQMN |
| | | SLRAEDTAVYYCAKVDYSNYLFFDYWGQGTLVTVSSASTKGP |
| | | SVFPLAPCSRSTSESTAALGCLVKDYFPEPVTVSWNSGALTS |
| | | GVHTFPAVLQSSGLYSLSSVVTVPSSSLGTKTYTCNVDHKPS |
| | | NTKVDKRVESKYGPPCPPCPAPEFLGGPSVFLFPPKPKDTLM |
| | | ISRTPEVTCVVVDVSQEDPEVQFNWYVDGVEVHNAKTKPREE |
| | | QFNSTYRVVSVLTVLHQDWLNGKEYKCKVSNKGLPSSIEKTI |
| | | SKAKGQPREPQVYTLPPSQEEMTKNQVSLTCLVKGFYPSDIA |
| | | VEWESNGQPENNYKTTPPVLDSDGSFFLYSRLTVDKSRWQEG |
| | | NVFSCSVMHEALHNHYTQKSLSLSLG |
| 272 | 1F4-IgG1.1f | EVQLLESGGGLVQPGGSLRLSCAASGFTFSIYAMSWVRQAPG |
| | heavy chain | KGLEWVSAISDSGGRTYFADSVRGRFTISRDNSKNTLSLQMN |
| | | SLRAEDTAVYYCAKVDYSNYLFFDYWGQGTLVTVSSASTKGP |
| | | SVFPLAPSSKSTSGGTAALGCLVKDYFPEPVTVSWNSGALTS |
| | | GVHTFPAVLQSSGLYSLSSVVTVPSSSLGTQTYICNVNHKPS |
| | | NTKVDKRVEPKSCDKTHTCPPCPAPEAEGAPSVFLFPPKPKD |
| | | TLMISRTPEVTCVVVDVSHEDPEVKFNWYVDGVEVHNAKTKP |
| | | REEQYNSTYRVVSVLTVLHQDWLNGKEYKCKVSNKALPSSIE |
| | | KTISKAKGQPREPQVYTLPPSREEMTKNQVSLTCLVKGFYPS |
| | | DIAVEWESNGQPENNYKTTPPVLDSDGSFFLYSKLTVDKSRW |
| | | QQGNVFSCSVMHEALHNHYTQKSLSLSPG |
| 273 | 1F4-IgG1.3f | EVQLLESGGGLVQPGGSLRLSCAASGFTFSIYAMSWVRQAPG |
| | heavy chain | KGLEWVSAISDSGGRTYFADSVRGRFTISRDNSKNTLSLQMN |
| | | SLRAEDTAVYYCAKVDYSNYLFFDYWGQGTLVTVSSASTKGP |
| | | SVFPLAPSSKSTSGGTAALGCLVKDYFPEPVTVSWNSGALTS |
| | | GVHTFPAVLQSSGLYSLSSVVTVPSSSLGTQTYICNVNHKPS |
| | | NTKVDKRVEPKSCDKTHTCPPCPAPEAEGAPSVFLFPPKPKD |
| | | TLMISRTPEVTCVVVDVSHEDPEVKFNWYVDGVEVHNAKTKP |
| | | REEQYNSTYRVVSVLTVLHQDWLNGKEYKCKVSNKALPAPIE |
| | | KTISKAKGQPREPQVYTLPPSREEMTKNQVSLTCLVKGFYPS |
| | | DIAVEWESNGQPENNYKTTPPVLDSDGSFFLYSKLTVDKSRW |
| | | QQGNVFSCSVMHEALHNHYTQKSLSLSPG |
| 274 | 1F4-D265A | EVQLLESGGGLVQPGGSLRLSCAASGFTFSIYAMSWVRQAGK |
| | heavy chain | GLEWVSAISDSGGRTYFADSVRGRFTISRDNSKNTLSLQMNS |
| | | LRAEDTAVYYCAKVDYSNYLFFDYWGQGTLVTVSSASTKGPS |
| | | VFPLAPSSKSTSGGTAALGCLVKDYFPEPVTVSWNSGALTSG |
| | | VHTFPAVLQSSGLYSLSSVVTVPSSSLGTQTYICNVNHKPSN |
| | | TKVDKRVEPKSCDKTHTCPPCPAPELLGGPSVFLFPPKPKDT |
| | | LMISRTPEVTCVVVAVSHEDPEVKFNWYVDGVEVHNAKTKPR |
| | | EEQYNSTYRVVSVLTVLHQDWLNGKEYKCKVSNKALPAPIEK |
| | | TISKAKGQPREPQVYTLPPSREEMTKNQVSLTCLVKGFYPSD |
| | | IVEWESNGQPENNYKTTPPVLDSDGSFFLYSKLTVDKSRWQQ |
| | | GNVFSCSVMHEALHNHYTQKSLSLSPGK |
| 275 | 1F4-CT | EVQLLESGGGLVQPGGSLRLSCAASGFTFSIYAMSWVRQAPG |
| | heavy chain | KGLEWVSAISDSGGRTYFADSVRGRFTISRDNSKNTLSLQMN |
| | | SLRAEDTAVYYCAKVDYSNYLFFDYWGQGTLVTVSSASTKGP |
| | | SVFPLAPSSKSTSGGTAALGCLVKDYFPEPVTVSWNSGALTS |
| | | GVHTFPAVLQSSGLYSLSSVVTVPSSSLGTQTYICNVNHKPS |
| | | NTKVDKRVEPKSCDKTHTSPPSPAPELLGGSSVFLFPPKPKD |
| | | TLMISRTPEVTCVVVDVSHEDPEVKFNWYVDGVEVHNAKTKP |
| | | REEQYNSTYRVVSVLTVLHQDWLNGKEYKCKVSNKALPAPIE |
| | | KTISKAKGQPREPQVYTLPPSRDELTKNQVSLTCLVKGFYPS |
| | | DIAVEWESNGQPENNYKTTPPVLDSDGSFFLYSKLTVDKSRW |
| | | QQGNVFSCSVMHEALHNHYTQKSLSLSPGK |

TABLE 25

| mAb name | HC | LC |
|---|---|---|
| 1F4-IgG1f | SEQ #: 270 | SEQ #: 269 |
| 1F4-IgG4.1 | SEQ #: 271 | SEQ #: 269 |
| 1F4-IgG1.1f | SEQ #: 272 | SEQ #: 269 |
| 1F4-IgG1.3f | SEQ #: 273 | SEQ #: 269 |
| 1F4-D265A | SEQ #: 274 | SEQ #: 269 |
| 1F4-CT | SEQ #: 275 | SEQ #: 269 |

[0451] Results:

[0452] dAb-Fc molecules were produced with mutations in the Fc domain to reduce FcgR binding. Specifically, the anti-CD40 domain antibody 3h56-269 was formatted with the following Fc domain variants: IgG1.1f, IgG1.3f, and IgG1-D265A. In each of 3h-56-269-IgG1.1f (SEQ ID NO: 77), 3h-56-269-IgG1.3f (SEQ ID NO: 78), and 3h-56-269-IgG1-D265A (SEQ ID NO: 79), amino acids 1-116 are 3h-56-269 dAb, amino acids 117-119 are a linker, and amino acids 120-351 are the Fc domain.

[0453] Each these dAb-Fc fusion proteins, as well as each of 3h56-269-IgG4.1 and 3h56-269-CT, was confirmed to bind with high affinity to purified human-CD40 monomer (hCD40monomer, generated in house) as measured by Biacore™ SPR. As shown in Table 26, the KD values range between 7.3 nM and 11.5 nM for the different Fc variants. Each of the dAb-Fc molecules also bound human CD40 with high avidity, as measured by SPR using hCD40-Fc on the surface of a sensor chip and the dAb-Fc molecules as soluble analytes in solution, where data for 250 nM and 25 nM dAb-Fc analyte injections were fit to a 1:1 Langmuir model to estimate avidity-influenced apparent KD values (KDₐₚₚₐᵣₑₙₜ) for all dAb-Fcs as <1 nM. See Table 26.

TABLE 26
SPR data for binding of dAb-Fc molecules to human CD40.

| | hCD40monomer binding | | | dAb-Fc binding |
|---|---|---|---|---|
| | to dAb-Fc molecules | | | to immobilized |
| | captured on immobilized | | | hCD40-Fc |
| | protein A surface (Affinity) | | | surface |
| | ka | kd | KD | (Avidity) |
| Ligand | (1/Ms) | (Vs) | (nM) | KDₐₚₚₐᵣₑₙₜ (nM) |
| 3h56-269-IgG4.1 | 8.5E+03 | 9.7E−05 | 11.5 | <1 |
| 3h56-269-CT | 1.6E+04 | 1.3E−04 | 8.0 | <1 |
| | 1.6E+04 | 1.2E−04 | 7.3 | <1 |
| 3h56-269-CT | 1.6E+04 | 1.3E−04 | 7.7 | <1 |
| (UCOE-CHO)* | 1.9E+04 | 1.4E−04 | 7.0 | <1 |
| 3h56-269-IgG1.1f | 9.6E+03 | 1.0E−04 | 10.8 | <1 |
| 3h56-269-IgG1.3f | 9.9E+03 | 9.1E−05 | 9.2 | <1 |
| | 1.1E+04 | 1.1E−04 | 9.8 | <1 |
| 3h56-269-IgG1-D265A | 1.1E+04 | 9.9E−05 | 9.0 | <1 |

*3h-56-269-CT expressed and purified from UCOE−CHO cells.

[0454] The FcgR binding properties of the dAb-Fc molecules and the various control monoclonal 1F4 antibodies were characterized by SPR. The first assay involved binding of 1 μM or 10 μM dAb-Fcs or a human-IgG1f antibody control (1F4-IgG1f) to anti-His Fab captured FcgR-His surfaces. These data are shown in Table 27.

TABLE 27
% Rmax data for 1 μM or 10 μM dAb-Fcs or 1F4-IgG1f antibody control binding to
anti-His Fab captured hFcgR-His proteins.

| | | Anti-His Fab captured FcgR | | | | | |
|---|---|---|---|---|---|---|---|
| | | High | | | | | |
| | | affinity | Low Affinity FcgR | | | | |
| | Conc | FcgR | hCD32a- | hCD32a- | | hCD16a- | hCD16b- |
| Sample | (μM) | hCD64 | H131 | R131 | hCD32b | V158 | NA2 |
| 1F4-IgG1f | 1 | 65% | 31% | 19% | 5% | 31% | 13% |
| 3h56-269-IgG4.1 | 1 | 68% | 27% | 30% | 20% | 6% | 1% |
| 3h56-269-IgG1-D265A | 1 | 68% | 7% | 2% | 0% | 1% | 0% |
| 3h56-269-IgG1.1f | 1 | 11% | 1% | 10% | 3% | 0% | 0% |
| 3h56-269-IgG1.3f | 1 | 12% | 1% | 8% | 3% | 1% | 0% |
| 3h56-269-CT | 1 | 72% | 0% | 1% | 0% | 1% | 0% |
| 1F4-IgG1f | 10 | 65% | 62% | 51% | 24% | 52% | 36% |
| 3h56-269-IgG4.1 | 10 | 69% | 65% | 66% | 57% | 27% | 9% |
| 3h56-269-IgG1-D265A | 10 | 69% | 33% | 17% | 2% | 2% | −1% |
| 3h56-269-IgG1.1f | 10 | 39% | 6% | 43% | 21% | 3% | 2% |
| 3h56-269-IgG1.3f | 10 | 39% | 6% | 37% | 19% | 5% | 4% |
| 3h56-269-CT | 10 | 70% | 2% | 10% | 3% | 6% | −1% |

[0455] In another assay, FcgR analytes (at 1 μM or 10 μM) were tested for binding to protein A-captured dAb-Fc surfaces (data shown in Table 28) and for binding to antibody surfaces (data shown in Table 29).

TABLE 28
% RMax data for 1 μM or 10 μM FcgRs binding to protein
A-captured dAb-Fc proteins.

| | | Protein A-captured dAb-Fc protein | | | | |
|---|---|---|---|---|---|---|
| | | | 3h56- | | | |
| | | 3h56- | 269- | 3h56- | 3h56- | 3h56- |
| | Conc | 269- | IgG1- | 269- | 269- | 269- |
| Sample | (μM) | IgG4.1 | D265A | IgG1.1f | IgG1.3f | CT |
| hCD64 | 1 | 99% | 41% | 1% | 2% | 80% |
| hCD32a-H131 | 1 | 29% | 3% | 0% | 1% | 1% |
| hCD32a-R131 | 1 | 31% | 1% | 4% | 5% | 1% |
| hCD32b | 1 | 19% | 0% | 1% | 2% | 1% |
| hCD16a-V158 | 1 | 12% | 0% | 0% | 1% | 1% |
| hCD16B-NA2 | 1 | 2% | 0% | 0% | 0% | 0% |
| hCD64 | 10 | 119% | 85% | 3% | 7% | 114% |
| hCD32a-H131 | 10 | 70% | 18% | 4% | 6% | 7% |
| hCD32a-R131 | 10 | 71% | 4% | 18% | 26% | 7% |
| hCD32b | 10 | 59% | 1% | 9% | 12% | 4% |
| hCD16a-V158 | 10 | 47% | 2% | 2% | 6% | 7% |
| hCD16B-NA2 | 10 | 13% | 0% | 1% | 3% | 1% |

TABLE 29
% Rmax data for 1 μM or 10 μM FcgRs
binding to protein A captured antibodies.

| | | Protein A-captured antibodies | | | | | |
|---|---|---|---|---|---|---|---|
| | Conc | 1F4- | 1F4- | 1F4- | 1F4- | 1F4- | 1F4- |
| Sample | (μM) | IgG1f | IgG4.1 | D265A | IgG1.1f | IgG1.3f | CT |
| hCD64 | 1 | 138% | 126% | 96% | 8% | 5% | 120% |
| hCD32a- | 1 | 62% | 29% | 7% | 2% | 1% | 2% |
| H131 | | | | | | | |
| hCD32a- | 1 | 48% | 33% | 3% | 5% | 3% | 2% |
| R131 | | | | | | | |
| hCD32b | 1 | 11% | 17% | 1% | 1% | 1% | 1% |
| hCD16a- | 1 | 97% | 15% | 1% | 3% | 2% | 2% |
| V158 | | | | | | | |
| hCD16B- | 1 | 33% | 4% | 1% | 4% | 3% | 0% |
| NA2 | | | | | | | |
| hCD64 | 10 | 155% | 139% | 131% | 17% | 14% | 131% |
| hCD32a- | 10 | 99% | 79% | 38% | 7% | 6% | 11% |
| H131 | | | | | | | |
| hCD32a- | 10 | 101% | 87% | 17% | 28% | 24% | 13% |
| R131 | | | | | | | |
| hCD32b | 10 | 55% | 68% | 4% | 11% | 12% | 8% |
| hCD16a- | 10 | 125% | 59% | 2% | 5% | 7% | 11% |
| V158 | | | | | | | |
| hCD16B- | 10 | 81% | 16% | −2% | 4% | 6% | 1% |
| NA2 | | | | | | | |

[0456] Based on the binding responses or lack thereof in these experiments, a subset of the higher affinity dAb-Fc/FcgR or Ab/FcgR interactions with strongest binding responses were selected for kinetic/affinity characterization using analyte titrations (FcgR analytes binding to protein A captured antibodies or dAb-Fcs). These data are presented in Table 30.

TABLE 30
KD values (in nM) for purified FcgR analytes binding to protein A captured
antibodies or dAb-Fcs.

| | | hCD32a- | hCD32a- | | hCD16a- | hCD16B- |
|---|---|---|---|---|---|---|
| Sample | hCD64 | H131 | R131 | hCD32b | V158 | NA2 |
| 1F4-IgG1f | 0.2 | 920 | 1400 | >5000 | 430 | 4800 |
| 1F4-IgG4.1 | 0.58 | 3700 | 2400 | 3100 | >5000 | >5000 |
| 3h56-269-IgG4.1 | 2.8 | >5000 | 2200 | >5000 | >5000 | >5000 |
| 3h56-269-IgG1-D265A | 62 | | | | | |
| 3h56-269-IgG1.1f | >5000 | | | | | |
| 3h56-269-IgG1.3f | >5000 | >5000 | >5000 | >5000 | >5000 | >5000 |
| 3h56-269-CT | 4.6 | >5000 | >5000 | >5000 | >5000 | >5000 |

[0457] Collectively, these FcgR binding SPR data show that the IgG1f and IgG4.1 isotype molecules have significantly higher FcgR affinity across all FcgRs as compared to the modified Fc variant IgG1-D265A, IgG1.1f, IgG1.3f, or CT molecules. Of the modified Fc variants, the hCD64 binding affinity was the strongest for 3h56-269-CT (KD=4.6 nM), weaker for 3h56-269-IgG1-D265A (KD=62 nM), and the weakest for 3h56-269-IgG1.1f and 3h56-269-IgG1.3f, for which affinity was too weak to quantitate under the conditions tested (K_{D}>5 μM, which is half of the highest analyte concentration tested). All of the other FcgR interactions (hCD32a-H131, hCD32a-R131, hCD32b, hCD16a-V158, hCD16b-NA2) for the IgG1-D265A, IgG1.1f, IgG1.3f and CT variants were also too weak to obtain reliable KD values (K_{D}>5 μM). However, differences in the relative binding responses can be observed in the % Rmax data. For example, the IgG1-D265A variant has stronger binding response for hCD32a-H131 as compared to the IgG1.1f, IgG1.3f or CT variants (Table 28). In contrast, the IgG1.1f and IgG1.3f variants have stronger binding responses for hCD32a-R131 as compared to the IgG1-D265A and CT variants (Table 28).

[0458] IgG1.3 containing fusion protein or antibody were assessed by DSC, icIEF and mass spectrometry. Materials and methods are described below.

[0459] Differential Scanning Calorimetry:

[0460] DSC experiments were performed on a MicroCal VP-Capillary DSC instrument (Malvern Instruments, Malvern, UK) in 10 mM NaPO4, 130 mM NaCl pH 7.1. Samples of 1 mg/ml dAb-Fc or antibody were tested using a scan range of 10-110° C. and a scan rate of 90° C./hr. Data were analyzed using MicroCal-Origin 7.0 software.

[0461] Imaged Capillary Isoelectric Focusing:

[0462] icIEF experiments were performed on a ProteinSimple iCE3™ System (ProteinSimple, San Jose, Calif.). For these studies the dAb-Fc or antibody samples, typically at 2 mg/ml concentration, were mixed with a carrier ampholyte mixture consisting of 2 M urea, 0.35% methylcellulose, 1% Pharmalyte 5-8, 3% Pharmalyte 8-10.5, and pI markers 5.85 and 10.10, to a final protein concentration of 0.20 mg/mL, and analyzed using a pre-focusing time of 1 min at 1.5 kV and a focusing time of 10 min at 3 kV.

[0463] Mass Spectrometry:

[0464] For mass spectrometry (mass spec) analysis, samples were reduced using 100 mM DTT, and N-deglycosylation was performed with peptide:N-Glycosidase (FPNGaseF). Liquid chromatography-mass spectrometry (LC/MS) instrumentation used was a Waters Synapt® G2 (Waters Corporation, Milford, Mass.) with a Waters Acquity® UPLC (ultra-performance liquid chromatography). The UPLC column was a Waters Acquity® BEH (ethylene bridged hybrid particle) C4 (2.1×150 mm, 300 Å, 1.7 um particle). The gradient was 10% to 38% (Mobile phase B) in 10 min at 200 μL/min flow rate. Mobile phase A was 0.1% formic acid in water. Mobile phase B was 0.1% formic acid in acetonitrile. Column temperature was 60° C. Data analysis was performed manually with the aid of Waters MassLynx™ software; spectral deconvolution was performed with the MaxEnt1 algorithm.

[0465] Accelerated Stability Studies:

[0466] Accelerated stability studies were conducted by first extensively dialyzing dAb-Fc molecules in target formulation buffers at 4° C. Samples were recovered and concentrated using Amicon® Ultra Centrifugal Filter Units (Merck KgaA, Germany) and prepared at different target concentrations in dialysis buffer. These samples were incubated at various temperatures, typically 4° C., 25° C., 32° C., and/or 40° C. for several weeks, with aliquots removed and analyzed by analytical size exclusion chromatography. Analytical size exclusion chromatography was conducted on an Agilent 1260 HPLC, using a Shodex™ K403-4F column (Showa Denko America, Inc., New York, N.Y.) in a mobile phase of 100 mM Sodium Phosphate, 150 mM Sodium Chloride, pH 7.3, flow rate of 0.3 ml/min.

[0467] Results—Differential Scanning Calorimetry:

[0468] DSC can be used to measure the thermal stability of a protein. The best fit Tm values are summarized in Table 31.

TABLE 31
Thermal melting temperature (Tm) values for dAb-Fc
molecules as determined by DSC.

| | Tm dAb and CH2 domains | | Tm CH3 |
|---|---|---|---|
| Sample | Tm1 (° C.) | Tm2 (° C.) | domain (° C.) |
| 3h56-269-IgG4.1 | 62.8 | | 69.6 |
| 3h56-269-CT | 55.4 | 60.4 | 83.2 |
| 3h56-269-IgG1.1f | 59.0 | 61.6 | 82.3 |
| 3h56-269-IgG1.3f | 57.0 | 62.8 | 81.9 |
| 3h56-269-IgG1-D265A | 56.4 | 61.4 | 82.4 |

[0469] Based on the characteristic thermal denaturation profiles for IgG Fc domains, the Fc CH3 domain transition for 3h56-269-IgG4.1 was assigned as the transition with midpoint (Tm) value of 69.6° C.; and the Fc CH3 domain of the various IgG1 molecules was assigned as the transition with Tm near ˜82-83° C. The denaturation of the dAb domain and CH2 domain for the dAb-Fcs were assigned to the transition(s) below 65° C., which differ between the different constructs, both in the onset of thermal denaturation (Tₒₙₛₑₜ), the shape of the unfolding transition, and the best fit Tm values. For example, the thermal transition for the dAb and CH2 domains of 3h56-269-IgG4.1 appears as a single overlapping or cooperative transition, with Tm value of 62.8° C. The denaturation profile for the dAb and CH2 domains of 3h56-269-IgG1-D265A, 3h56-269-IgG1.1f and 3h56-269-IgG1.3f are all consistent with a more asymmetrical transition, which was best described by two transitions having Tm values between ˜56-63° C. 3h56-269-CT had the lowest Tₒₙₛₑₜ, beginning to unfold near 40° C., with a broad thermal transition and the lowest fitted Tm values of Tm1=55.4° C. and Tm2=60.4° C.

[0470] Results—Imaged Capillary Isoelectric Focusing (icIEF):

[0471] Imaged capillary isoelectric focusing (icIEF) can be used to characterize sample homogeneity or heterogeneity. The ability to generate a homogeneous product is another important developability criterion. Consequently, during the discovery and optimization of a novel protein therapeutic, various analytical methods are utilized to characterize and quantitate sample heterogeneities, and to select for the most homogeneous molecules.

[0472] The charge profiles for dAb-Fc molecules were characterized by icIEF. The data are shown in FIG. 23. The icIEF profiles for 3h56-269-IgG4.1 (FIG. 23A), 3h56-269-IgG1.1f (FIG. 23E) and 3h56-269-IgG1.3f (FIG. 23F) are all relatively simple, each consisting of a distinct main peak with area of 69-86%, and between two and four charge variants in lower abundance. This icIEF profile is similar to the typical profile obtained for an antibody. The main peak for 3h56-269-IgG1-D265A (FIG. 23D) is somewhat lower abundance (49%) with a corresponding higher level of acidic variants with at least six detectable species. In contrast, the profile for 3h56-269-CT (FIG. 23B) is highly heterogeneous, consisting of at least 16 different species and no clear main peak. The icIEF profile for 3h56-269-CT expressed in a different cell line (UCOE-CHO) was equally heterogeneous (FIG. 23C), although the distribution of the charge variants was considerably different from the HEK293-expressed material.

[0473] Results—Mass Spectrometry:

[0474] Typical glycosylation on the Fc domain of IgG or Fc-containing proteins is a mixture of G0F, G1F and some G2F species. Other glycoforms, such as sialylated or non-fucosylated forms, are generally found in much lower abundance or at undetectable levels.

[0475] To characterize the glycosylation profiles of the dAb-Fc proteins, and to compare the dAb-Fc proteins to control antibodies with similar Fc mutations, mass spectrometry experiments were conducted. The data are shown in Table 32.

TABLE 32
Detectable glycoforms in dAb-Fc and antibody
molecules as determined by mass spectrometry.

| Sample | G0F | G1F | G2F | G2FS1 | G2FS2 |
|---|---|---|---|---|---|
| 3h56-269-IgG4.1 | 67% | 29% | 4% | | |
| 3h56-269-IgG1.1f | 32% | 58% | 9% | | |
| 3h56-269-IgG1.3f | 42% | 55% | 3% | | |
| 3h56-269-IgG1-D265A | 4% | 37% | 43% | 13% | 2% |
| 1F4-IgG1f | 68% | 32% | | | |
| 1F4-IgG1.3f | 26% | 64% | 10% | | |
| 1F4-D265A | 27% | 40% | 27% | 4% | 2% |

[0476] The mass spectrometry data for the control antibodies 1F4-IgG1f and 1F4-IgG1.3f, as well as for dAb-Fc antibodies 3h56-269-IgG4.1, 3h56-269-IgG1.1f, 3h56-269-IgG1.3f, showed that these proteins consist of a typical mixture of G0F, G1F glycoforms, with a lower abundance of G2F species.

[0477] Thus, IgG1.3 (heavy chain constant region and Fc) is essentially devoid of binding to CD16, CD32a, CD32b and CD64 and has good biophysical properties. This has also been observed when an IgG1.3 Fc was linked to the variable domain of an anti-TIM3 antibodies (see WO2018/013818). An anti-TIM3 antibody comprising IgG1.3 was shown to have good thermal stability (Tm1=68.1° C., Tm2=80.3° C., Tm3=82.6° C.) and thermal reversibility (95.6% at 74° C., 25.5% at 80° C.), which suggests that the molecule retains its structural integrity under thermal stress and has robust refolding properties when stress is released.

SEQUENCE TABLE 33

| SEQ ID NO | Description | Sequence |
|---|---|---|
| 1 | Full-length IgG1 wild-type | ASTKGPSVFPLAPSSKSTSGGTAALGCLVKDYFPEPVTVSWNS |
| | | GALTSGVHTFPAVLQSSGLYSLSSVVTVPSSSLGTQTYICNVN |
| | | HKPSNTKVDKKVEPKSCDKTHTCPPCPAPELLGGPSVFLFPPK |
| | | PKDTLMISRTPEVTCVVVDVSHEDPEVKFNWYVDGVEVHNAKT |
| | | KPREEQYNSTYRVVSVLTVLHQDWLNGKEYKCKVSNKALPAPI |
| | | EKTISKAKGQPREPQVYTLPPSREEMTKNQVSLTCLVKGFYPS |
| | | DIAVEWESNGQPENNYKTTPPVLDSDGSFFLYSKLTVDKSRWQ |
| | | QGNVFSCSVMHEALHNHYTQKSLSLSPGK |
| 2 | CH1 IgG1 wild-type | ASTKGPSVFPLAPSSKSTSGGTAALGCLVKDYFPEPVTVSWNS |
| | | GALTSGVHTFPAVLQSSGLYSLSSVVTVPSSSLGTQTYICNVN |
| | | HKPSNTKVDKKV |
| 3 | Hinge IgG1 wild-type | EPKSCDKTHTCPPCPAPELLGG |
| 4 | CH2 IgG1 wild-type | PSVFLFPPKPKDTLMISRTPEVTCVVVDVSHEDPEVKFNWYVD |
| | | GVEVHNAKTKPREEQYNSTYRVVSVLTVLHQDWLNGKEYKCKV |
| | | SNKALPAPIEKTISKAK |
| 5 | CH3 IgG1 wild-type | GQPREPQVYTLPPSREEMTKNQVSLTCLVKGFYPSDIAVEWES |
| | | NGQPENNYKTTPPVLDSDGSFFLYSKLTVDKSRWQQGNVFSCS |
| | | VMHEALHNHYTQKSLSLSPGK |
| 6 | Full-length IgG2 wild-type | ASTKGPSVFPLAPCSRSTSESTAALGCLVKDYFPEPVTVSWNS |
| | | GALTSGVHTFPAVLQSSGLYSLSSVVTVPSSNFGTQTYTCNVD |
| | | HKPSNTKVDKTVERKCCVECPPCPAPPVAGPSVFLFPPKPKDT |
| | | LMISRTPEVTCVVVDVSHEDPEVQFNWYVDGVEVHNAKTKPRE |
| | | EQFNSTFRVVSVLTVVHQDWLNGKEYKCKVSNKGLPAPIEKTI |
| | | SKTKGQPREPQVYTLPPSREEMTKNQVSLTCLVKGFYPSDIAV |
| | | EWESNGQPENNYKTTPPMLDSDGSFFLYSKLTVDKSRWQQGNV |
| | | FSCSVMHEALHNHYTQKSLSLSPGK |
| 7 | CH1 IgG2 wild-type | ASTKGPSVFPLAPCSRSTSESTAALGCLVKDYFPEPVTVSWNS |
| | | GALTSGVHTFPAVLQSSGLYSLSSVVTVPSSNFGTQTYTCNVD |
| | | HKPSNTKVDKTV |
| 8 | Hinge IgG2 wild-type | ERKCCVECPPCPAPPVAG |
| 9 | CH2 IgG2 wild-type | PSVFLFPPKPKDTLMISRTPEVTCVVVDVSHEDPEVQFNWYVD |
| | | GVEVHNAKTKPREEQFNSTFRVVSVLTVVHQDWLNGKEYKCKV |
| | | SNKGLPAPIEKTISKTK |
| 10 | CH3 IgG2 wild-type | GQPREPQVYTLPPSREEMTKNQVSLTCLVKGFYPSDIAVEWES |
| | | NGQPENNYKTTPPMLDSDGSFFLYSKLTVDKSRWQQGNVFSCS |
| | | VMHEALHNHYTQKSLSLSPGK |
| 11 | Full-length IgG3 wild-type | ASTKGPSVFPLAPCSRSTSGGTAALGCLVKDYFPEPVTVSWNS |
| | | GALTSGVHTFPAVLQSSGLYSLSSVVTVPSSSLGTQTYTCNVN |
| | | HKPSNTKVDKRVELKTPLGDTTHTCPRCPEPKSCDTPPPCPRC |
| | | PEPKSCDTPPPCPRCPEPKSCDTPPPCPRCPAPELLGGPSVFL |
| | | FPPKPKDTLMISRTPEVTCVVVDVSHEDPEVQFKWYVDGVEVH |
| | | NAKTKPREEQYNSTFRVVSVLTVLHQDWLNGKEYKCKVSNKAL |
| | | PAPIEKTISKTKGQPREPQVYTLPPSREEMTKNQVSLTCLVKG |
| | | FYPSDIAVEWESSGQPENNYNTTPPMLDSDGSFFLYSKLTVDK |
| | | SRWQQGNIFSCSVMHEALHNRFTQKSLSLSPGK |
| 12 | CH1 IgG3 wild-type | ASTKGPSVFPLAPCSRSTSGGTAALGCLVKDYFPEPVTVSWNS |
| | | GALTSGVHTFPAVLQSSGLYSLSSVVTVPSSSLGTQTYTCNVN |
| | | HKPSNTKVDKRV |
| 13 | Hinge IgG3 wild-type | ELKTPLGDTTHTCPRCPE |
| 14 | CH2 IgG3 wild-type | PKSCDTPPPCPRCPEPKSCDTPPPCPRCPEPKSCDTPPPCPRC |
| | | PAPELLGGPSVFLFPPKPKDTLMISRTPEVTCVVVDVSHEDPE |
| | | VQFKWYVDGVEVHNAKTKPREEQYNSTFRVVSVLTVLHQDWLN |
| | | GKEYKCKVSNKALPAPIEKTISKTK |
| 15 | CH3 IgG3 wild-type | GQPREPQVYTLPPSREEMTKNQVSLTCLVKGFYPSDIAVEWES |
| | | SGQPENNYNTTPPMLDSDGSFFLYSKLTVDKSRWQQGNIFSCS |
| | | VMHEALHNRFTQKSLSLSPGK |
| 16 | Full-length IgG4 wild-type | ASTKGPSVFPLAPCSRSTSESTAALGCLVKDYFPEPVTVSWNS |
| | | GALTSGVHTFPAVLQSSGLYSLSSVVTVPSSSLGTKTYTCNVD |
| | | HKPSNTKVDKRVESKYGPPCPSCPAPEFLGGPSVFLFPPKPKD |
| | | TLMISRTPEVTCVVVDVSQEDPEVQFNWYVDGVEVHNAKTKPR |
| | | EEQFNSTYRVVSVLTVLHQDWLNGKEYKCKVSNKGLPSSIEKT |
| | | ISKAKGQPREPQVYTLPPSQEEMTKNQVSLTCLVKGFYPSDIA |
| | | VEWESNGQPENNYKTTPPVLDSDGSFFLYSRLTVDKSRWQEGN |
| | | VFSCSVMHEALHNHYTQKSLSLSLGK |
| 17 | CH1 IgG4 wild-type | ASTKGPSVFPLAPCSRSTSESTAALGCLVKDYFPEPVTVSWNS |
| | | GALTSGVHTFPAVLQSSGLYSLSSVVTVPSSSLGTKTYTCNVD |
| | | HKPSNTKVDKRV |
| 18 | Hinge IgG4 wild-type | ESKYGPPCPSCPAPEFLGG |
| 19 | CH2 IgG4 wild-type | PSVFLFPPKPKDTLMISRTPEVTCVVVDVSQEDPEVQFNWYVD |
| | | GVEVHNAKTKPREEQFNSTYRVVSVLTVLHQDWLNGKEYKCKV |
| | | SNKGLPSSIEKTISKAK |
| 20 | CH3 IgG4 wild-type | GQPREPQVYTLPPSQEEMTKNQVSLTCLVKGFYPSDIAVEWES |
| | | NGQPENNYKTTPPVLDSDGSFFLYSRLTVDKSRWQEGNVFSCS |
| | | VMHEALHNHYTQKSLSLSLGK |
| 21 | Modified IgG2 Hinge (C219S) | ERKSCVECPPCPAPPVAG |
| 22 | IgG2/IgG1 hybrid hinge | ERKCCVECPPCPAPELLGG |
| 23 | IgG2 C219S/IgG1 hybrid hinge | ERKSCVECPPCPAPELLGG |
| 24 | Modified CH2 IgG1 | PSVFLFPPKPKDTLMISRTPEVTCVVVDVSHEDPEVKFNWYVD |
| | (A330S/P331S) | GVEVHNAKTKPREEQYNSTYRVVSVLTVLHQDWLNGKEYKCKV |
| | | SNKALPSSIEKTISKAK |
| 25 | IgG1.1 Hinge | EPKSCDKTHTCPPCPAPEAEGA |
| | (L234A/L235E/G237A) | |
| 26 | IgG1-IgG2-IgG1 | ASTKGPSVFPLAPSSKSTSGGTAALGCLVKDYFPEPVTVSWNS |
| | (IgG1-IgG2/IgG1(SEQ#22)- | GALTSGVHTFPAVLQSSGLYSLSSVVTVPSSSLGTQTYICNVN |
| | IgG1-IgG1) | HKPSNTKVDKKVERKCCVECPPCPAPELLGGPSVFLFPPKPKD |
| | | TLMISRTPEVTCVVVDVSHEDPEVKFNWYVDGVEVHNAKTKPR |
| | | EEQYNSTYRVVSVLTVLHQDWLNGKEYKCKVSNKALPAPIEKT |
| | | ISKAKGQPREPQVYTLPPSREEMTKNQVSLTCLVKGFYPSDIA |
| | | VEWESNGQPENNYKTTPPVLDSDGSFFLYSKLTVDKSRWQQGN |
| | | VFSCSVMHEALHNHYTQKSLSLSPG |
| 27 | IgG1-IgG2-IgG12 | ASTKGPSVFPLAPSSKSTSGGTAALGCLVKDYFPEPVTVSWNS |
| | (IgG1-IgG2(SEQ#8)- | GALTSGVHTFPAVLQSSGLYSLSSVVTVPSSSLGTQTYICNVN |
| | IgG1-IgG1) | HKPSNTKVDKKVERKCCVECPPCPAPPVAGPSVFLFPPKPKDT |
| | | LMISRTPEVTCVVVDVSHEDPEVKFNWYVDGVEVHNAKTKPRE |
| | | EQYNSTYRVVSVLTVLHQDWLNGKEYKCKVSNKALPAPIEKTI |
| | | SKAKGQPREPQVYTLPPSREEMTKNQVSLTCLVKGFYPSDIAV |
| | | EWESNGQPENNYKTTPPVLDSDGSFFLYSKLTVDKSRWQQGNV |
| | | FSCSVMHEALHNHYTQKSLSLSPG |
| 28 | IgG2-IgG1 | ASTKGPSVFPLAPCSRSTSESTAALGCLVKDYFPEPVTVSWNS |
| | (IgG2-IgG2/IgG1(SEQ#22)- | GALTSGVHTFPAVLQSSGLYSLSSVVTVPSSNFGTQTYTCNVD |
| | IgG1-IgG1) | HKPSNTKVDKTVERKCCVECPPCPAPELLGGPSVFLFPPKPKD |
| | | TLMISRTPEVTCVVVDVSHEDPEVKFNWYVDGVEVHNAKTKPR |
| | | EEQYNSTYRVVSVLTVLHQDWLNGKEYKCKVSNKALPAPIEKT |
| | | ISKAKGQPREPQVYTLPPSREEMTKNQVSLTCLVKGFYPSDIA |
| | | VEWESNGQPENNYKTTPPVLDSDGSFFLYSKLTVDKSRWQQGN |
| | | VFSCSVMHEALHNHYTQKSLSLSPG |
| 29 | IgG2-IgG12 | ASTKGPSVFPLAPCSRSTSESTAALGCLVKDYFPEPVTVSWNS |
| | (IgG2-IgG2(SEQ#8)- | GALTSGVHTFPAVLQSSGLYSLSSVVTVPSSNFGTQTYTCNVD |
| | IgG1-IgG1) | HKPSNTKVDKTVERKCCVECPPCPAPPVAGPSVFLFPPKPKDT |
| | | LMISRTPEVTCVVVDVSHEDPEVKFNWYVDGVEVHNAKTKPRE |
| | | EQYNSTYRVVSVLTVLHQDWLNGKEYKCKVSNKALPAPIEKTI |
| | | SKAKGQPREPQVYTLPPSREEMTKNQVSLTCLVKGFYPSDIAV |
| | | EWESNGQPENNYKTTPPVLDSDGSFFLYSKLTVDKSRWQQGNV |
| | | FSCSVMHEALHNHYTQKSLSLSPG |
| 30 | IgG1-IgG2-IgG1.1 | ASTKGPSVFPLAPSSKSTSGGTAALGCLVKDYFPEPVTVSWNS |
| | (IgG1-IgG2(SEQ#8)- | GALTSGVHTFPAVLQSSGLYSLSSVVTVPSSSLGTQTYICNVN |
| | IgG1(A330S/P331S)-IgG1) | HKPSNTKVDKKVERKCCVECPPCPAPPVAGPSVFLFPPKPKDT |
| | | LMISRTPEVTCVVVDVSHEDPEVKFNWYVDGVEVHNAKTKPRE |
| | | EQYNSTYRVVSVLTVLHQDWLNGKEYKCKVSNKALPSSIEKTI |
| | | SKAKGQPREPQVYTLPPSREEMTKNQVSLTCLVKGFYPSDIAV |
| | | EWESNGQPENNYKTTPPVLDSDGSFFLYSKLTVDKSRWQQGNV |
| | | FSCSVMHEALHNHYTQKSLSLSPG |
| 31 | IgG2-IgG1.1 | ASTKGPSVFPLAPCSRSTSESTAALGCLVKDYFPEPVTVSWNS |
| | (IgG2-IgG2(SEQ#8)- | GALTSGVHTFPAVLQSSGLYSLSSVVTVPSSNFGTQTYTCNVD |
| | IgG1(A330S/P331S)-IgG1) | HKPSNTKVDKTVERKCCVECPPCPAPPVAGPSVFLFPPKPKDT |
| | | LMISRTPEVTCVVVDVSHEDPEVKFNWYVDGVEVHNAKTKPRE |
| | | EQYNSTYRVVSVLTVLHQDWLNGKEYKCKVSNKALPSSIEKTI |
| | | SKAKGQPREPQVYTLPPSREEMTKNQVSLTCLVKGFYPSDIAV |
| | | EWESNGQPENNYKTTPPVLDSDGSFFLYSKLTVDKSRWQQGNV |
| | | FSCSVMHEALHNHYTQKSLSLSPGK |
| 32 | IgG1-IgG2CS-IgG1 | ASTKGPSVFPLAPSSKSTSGGTAALGCLVKDYFPEPVTVSWNS |
| | (IgG1-IgG2(C219S)- | GALTSGVHTFPAVLQSSGLYSLSSVVTVPSSSLGTQTYICNVN |
| | IgG1-IgG1) | HKPSNTKVDKKVERKSCVECPPCPAPPVAGPSVFLFPPKPKDT |
| | | LMISRTPEVTCVVVDVSHEDPEVKFNWYVDGVEVHNAKTKPRE |
| | | EQYNSTYRVVSVLTVLHQDWLNGKEYKCKVSNKALPAPIEKTI |
| | | SKAKGQPREPQVYTLPPSREEMTKNQVSLTCLVKGFYPSDIAV |
| | | EWESNGQPENNYKTTPPVLDSDGSFFLYSKLTVDKSRWQQGNV |
| | | FSCSVMHEALHNHYTQKSLSLSPG |
| 33 | IgG1-IgG2CS-IgG12 | ASTKGPSVFPLAPSSKSTSGGTAALGCLVKDYFPEPVTVSWNS |
| | (IgG1-IgG2(C219S)- | GALTSGVHTFPAVLQSSGLYSLSSVVTVPSSSLGTQTYICNVN |
| | IgG1-IgG1) | HKPSNTKVDKKVERKSCVECPPCPAPPVAGPSVFLFPPKPKDT |
| | | LMISRTPEVTCVVVDVSHEDPEVKFNWYVDGVEVHNAKTKPRE |
| | | EQYNSTYRVVSVLTVLHQDWLNGKEYKCKVSNKALPAPIEKTI |
| | | SKAKGQPREPQVYTLPPSREEMTKNQVSLTCLVKGFYPSDIAV |
| | | EWESNGQPENNYKTTPPVLDSDGSFFLYSKLTVDKSRWQQGNV |
| | | FSCSVMHEALHNHYTQKSLSLSPG |
| 34 | IgG2CS-IgG1 | ASTKGPSVFPLAPCSRSTSESTAALGCLVKDYFPEPVTVSWNS |
| | (IgG2-IgG2(C219S)- | GALTSGVHTFPAVLQSSGLYSLSSVVTVPSSNFGTQTYTCNVD |
| | IgG1-IgG1) | HKPSNTKVDKTVERKSCVECPPCPAPPVAGPSVFLFPPKPKDT |
| | | LMISRTPEVTCVVVDVSHEDPEVKFNWYVDGVEVHNAKTKPRE |
| | | EQYNSTYRVVSVLTVLHQDWLNGKEYKCKVSNKALPAPIEKTI |
| | | SKAKGQPREPQVYTLPPSREEMTKNQVSLTCLVKGFYPSDIAV |
| | | EWESNGQPENNYKTTPPVLDSDGSFFLYSKLTVDKSRWQQGNV |
| | | FSCSVMHEALHNHYTQKSLSLSPG |
| 35 | IgG2CS-IgG12 | ASTKGPSVFPLAPCSRSTSESTAALGCLVKDYFPEPVTVSWNS |
| | (IgG2-IgG2(C219S)- | GALTSGVHTFPAVLQSSGLYSLSSVVTVPSSNFGTQTYTCNVD |
| | IgG1-IgG1) | HKPSNTKVDKTVERKSCVECPPCPAPPVAGPSVFLFPPKPKDT |
| | | LMISRTPEVTCVVVDVSHEDPEVKFNWYVDGVEVHNAKTKPRE |
| | | EQYNSTYRVVSVLTVLHQDWLNGKEYKCKVSNKALPAPIEKTI |
| | | SKAKGQPREPQVYTLPPSREEMTKNQVSLTCLVKGFYPSDIAV |
| | | EWESNGQPENNYKTTPPVLDSDGSFFLYSKLTVDKSRWQQGNV |
| | | FSCSVMHEALHNHYTQKSLSLSPG |
| 36 | IgG1-IgG2CS-IgG1.1 | ASTKGPSVFPLAPSSKSTSGGTAALGCLVKDYFPEPVTVSWNS |
| | (IgG1-IgG2(C219S)- | GALTSGVHTFPAVLQSSGLYSLSSVVTVPSSSLGTQTYICNVN |
| | IgG1(A330S/P331S)-IgG1) | HKPSNTKVDKKVERKSCVECPPCPAPPVAGPSVFLFPPKPKDT |
| | | LMISRTPEVTCVVVDVSHEDPEVKFNWYVDGVEVHNAKTKPRE |
| | | EQYNSTYRVVSVLTVLHQDWLNGKEYKCKVSNKALPSSIEKTI |
| | | SKAKGQPREPQVYTLPPSREEMTKNQVSLTCLVKGFYPSDIAV |
| | | EWESNGQPENNYKTTPPVLDSDGSFFLYSKLTVDKSRWQQGNV |
| | | FSCSVMHEALHNHYTQKSLSLSPG |
| 37 | IgG2CS-IgG1.1 | ASTKGPSVFPLAPCSRSTSESTAALGCLVKDYFPEPVTVSWNS |
| | (IgG2-IgG2(C219S)- | GALTSGVHTFPAVLQSSGLYSLSSVVTVPSSNFGTQTYTCNVD |
| | IgG1(A330S/P331S)-IgG1) | HKPSNTKVDKTVERKSCVECPPCPAPPVAGPSVFLFPPKPKDT |
| | | LMISRTPEVTCVVVDVSHEDPEVKFNWYVDGVEVHNAKTKPRE |
| | | EQYNSTYRVVSVLTVLHQDWLNGKEYKCKVSNKALPSSIEKTI |
| | | SKAKGQPREPQVYTLPPSREEMTKNQVSLTCLVKGFYPSDIAV |
| | | EWESNGQPENNYKTTPPVLDSDGSFFLYSKLTVDKSRWQQGNV |
| | | FSCSVMHEALHNHYTQKSLSLSPG |
| 38 | Ab 11F11 VH | QVQLVESGGGVVQPGRSLRLSCATSGFTFSNYGMHWVRQAPGK |
| | | GLEWVAVILYDGSNKYYPDSVKGRFTISRDNSKNTLYLQMNSL |
| | | RAEDTAVYYCARGGSSWYPDSFDIWGQGTMVTVSS |
| 39 | Ab 4C3 VH | EVQLVESGGGLVQPGRSLRLSCAASGFTFDDYAMHWVRQAPGK |
| | | GLEWVSGISWKSGSIGYADSVKGRFTISRDNAKNSLYLQMNSL |
| | | RAEDTALYYCVKGYYVILTGLDYWGQGTLVTVSS |
| 40 | Ab CD73.10 VH | QVQLVESGGGVVQPGRSLRLSCAASGFTFSNYGMHWVRQAPGK |
| | | GLEWVAVIWYDESNKYYPDSVKGRFTISRDNSKNTLYLQMNSL |
| | | RAEDTAVYYCARGGSSWYPDSFDIWGQGTMVTVSS |
| 41 | Ab CD73.3 VH (4C3/V94A) | EVQLVESGGGLVQPGRSLRLSCAASGFTFDDYAMHWVRQAPGK |
| | | GLEWVSGISWKSGSIGYADSVKGRFTISRDNAKNSLYLQMNSL |
| | | RAEDTVLYYCVKGYYVILTGLDYWGQGTLVTVSS |
| 42 | Ab 6E11 VH | EVQLVESGGALVQPGRSLRLSCAASGFTFDDYAMHWVRQAPGK |
| | | GLEWVSGITWNSGGIGYADSVKGRFTISRDNAKNSLYLQMNSL |
| | | RAEDTALYYCAKDRYYSSWLLFDNWGQGILVTVSS |
| 43 | Ab CD73.4VH | QVQLVESGGGVVQPGRSLRLSCAASGFTFSNYGMHWVRQAPGK |
| | | GLEWVAVILYDGSNKYYPDSVKGRFTISRDNSKNTLYLQMNSL |
| | | RAEDTAVYYCARGGSSWYPDSFDIWGQGTMVTVSS |
| 44 | Ab 11F11 full-length HC | QVQLVESGGGVVQPGRSLRLSCATSGFTFSNYGMHWVRQAPGK |
| | | GLEWVAVILYDGSNKYYPDSVKGRFTISRDNSKNTLYLQMNSL |
| | | RAEDTAVYYCARGGSSWYPDSFDIWGQGTMVTVSSASTKGPSV |
| | | FPLAPCSRSTSESTAALGCLVKDYFPEPVTVSWNSGALTSGVH |
| | | TFPAVLQSSGLYSLSSVVTVPSSNFGTQTYTCNVDHKPSNTKV |
| | | DKTVERKCCVECPPCPAPPVAGPSVFLFPPKPKDTLMISRTPE |
| | | VTCVVVDVSHEDPEVQFNWYVDGVEVHNAKTKPREEQFNSTFR |
| | | VVSVLTVVHQDWLNGKEYKCKVSNKGLPAPIEKTISKTKGQPR |
| | | EPQVYTLPPSREEMTKNQVSLTCLVKGFYPSDIAVEWESNGQP |
| | | ENNYKTTPPMLDSDGSFFLYSKLTVDKSRWQQGNVFSCSVMHE |
| | | ALHNHYTQKSLSLSPGK |
| 45 | Ab 4C3 full-length | HCEVQLVESGGGLVQPGRSLRLSCAASGFTFDDYAMHWVRQAP |
| | | GKGLEWVSGISWKSGSIGYADSVKGRFTISRDNAKNSLYLQMN |
| | | SLRAEDTALYYCVKGYYVILTGLDYWGQGTLVTVSSASTKGPS |
| | | VFPLAPSSKSTSGGTAALGCLVKDYFPEPVTVSWNSGALTSGV |
| | | HTFPAVLQSSGLYSLSSVVTVPSSSLGTQTYICNVNHKPSNTK |
| | | VDKKVEPKSCDKTHTCPPCPAPELLGGPSVFLFPPKPKDTLMI |
| | | SRTPEVTCVVVDVSHEDPEVKFNWYVDGVEVHNAKTKPREEQY |
| | | NSTYRVVSVLTVLHQDWLNGKEYKCKVSNKALPAPIEKTISKA |
| | | KGQPREPQVYTLPPSRDELTKNQVSLTCLVKGFYPSDIAVEWE |
| | | SNGQPENNYKTTPPVLDSDGSFFLYSKLTVDKSRWQQGNVFSC |
| | | SVMHEALHNHYTQKSLSLSPGK |
| 46 | Ab 6E11 full-length HC | EVQLVESGGALVQPGRSLRLSCAASGFTFDDYAMHWVRQAPGK |
| | | GLEWVSGITWNSGGIGYADSVKGRFTISRDNAKNSLYLQMNSL |
| | | RAEDTALYYCAKDRYYSSWLLFDNWGQGILVTVSSASTKGPSV |
| | | FPLAPSSKSTSGGTAALGCLVKDYFPEPVTVSWNSGALTSGVH |
| | | TFPAVLQSSGLYSLSSVVTVPSSSLGTQTYICNVNHKPSNTKV |
| | | DKKVEPKSCDKTHTCPPCPAPELLGGPSVFLFPPKPKDTLMIS |
| | | RTPEVTCVVVDVSHEDPEVKFNWYVDGVEVHNAKTKPREEQYN |
| | | STYRVVSVLTVLHQDWLNGKEYKCKVSNKALPAPIEKTISKAK |
| | | GQPREPQVYTLPPSRDELTKNQVSLTCLVKGFYPSDIAVEWES |
| | | NGQPENNYKTTPPVLDSDGSFFLYSKLTVDKSRWQQGNVFSCS |
| | | VMHEALHNHYTQKSLSLSPGK |
| 47 | Ab CD73.10-IgG2-C219S | QVQLVESGGGVVQPGRSLRLSCAASGFTFSNYGMHWVRQAPGK |
| | full-length HC | GLEWVAVIWYDESNKYYPDSVKGRFTISRDNSKNTLYLQMNSL |
| | | RAEDTAVYYCARGGSSWYPDSFDIWGQGTMVTVSSASTKGPSV |
| | | FPLAPCSRSTSESTAALGCLVKDYFPEPVTVSWNSGALTSGVH |
| | | TFPAVLQSSGLYSLSSVVTVPSSNFGTQTYTCNVDHKPSNTKV |
| | | DKTVERKSCVECPPCPAPPVAGPSVFLFPPKPKDTLMISRTPE |
| | | VTCVVVDVSHEDPEVQFNWYVDGVEVHNAKTKPREEQFNSTFR |
| | | VVSVLTVVHQDWLNGKEYKCKVSNKGLPAPIEKTISKTKGQPR |
| | | EPQVYTLPPSREEMTKNQVSLTCLVKGFYPSDIAVEWESNGQP |
| | | ENNYKTTPPMLDSDGSFFLYSKLTVDKSRWQQGNVFSCSVMHE |
| | | ALHNHYTQKSLSLSPG |
| 48 | Ab CD73.10-IgG2-C219S- | QVQLVESGGGVVQPGRSLRLSCAASGFTFSNYGMHWVRQAPGH |
| | IgG1.1 full-length HC | CKGLEWVAVIWYDESNKYYPDSVKGRFTISRDNSKNTLYLQMN |
| | | SLRAEDTAVYYCARGGSSWYPDSFDIWGQGTMVTVSSASTKGP |
| | | SVFPLAPCSRSTSESTAALGCLVKDYFPEPVTVSWNSGALTSG |
| | | VHTFPAVLQSSGLYSLSSVVTVPSSNFGTQTYTCNVDHKPSNT |
| | | KVDKTVERKSCVECPPCPAPPVAGPSVFLFPPKPKDTLMISRT |
| | | PEVTCVVVDVSHEDPEVKFNWYVDGVEVHNAKTKPREEQYNST |
| | | YRVVSVLTVLHQDWLNGKEYKCKVSNKALPSSIEKTISKAKGQ |
| | | PREPQVYTLPPSREEMTKNQVSLTCLVKGFYPSDIAVEWESNG |
| | | QPENNYKTTPPMLDSDGSFFLYSKLTVDKSRWQQGNVFSCSVM |
| | | HEALHNHYTQKSLSLSPG |
| 49 | Ab CD73.10-IgG1.1 | QVQLVESGGGVVQPGRSLRLSCAASGFTFSNYGMHWVRQAPGK |
| | full-length HC | GLEWVAVIWYDESNKYYPDSVKGRFTISRDNSKNTLYLQMNSL |
| | (IgG1.1- | RAEDTAVYYCARGGSSWYPDSFDIWGQGTMVTVSSASTKGPSV |
| | IgG1.1(L234A/L235E/G237A)- | FPLAPSSKSTSGGTAALGCLVKDYFPEPVTVSWNSGALTSGVH |
| | IgG1.1(A330S/P331S)-IgG1.1) | TFPAVLQSSGLYSLSSVVTVPSSSLGTQTYICNVNHKPSNTKV |
| | | DKKVEPKSCDKTHTCPPCPAPEAEGAPSVFLFPPKPKDTLMIS |
| | | RTPEVTCVVVDVSHEDPEVKFNWYVDGVEVHNAKTKPREEQYN |
| | | STYRVVSVLTVLHQDWLNGKEYKCKVSNKALPSSIEKTISKAK |
| | | GQPREPQVYTLPPSREEMTKNQVSLTCLVKGFYPSDIAVEWES |
| | | NGQPENNYKTTPPVLDSDGSFFLYSKLTVDKSRWQQGNVFSCS |
| | | VMHEALHNHYTQKSLSLSPG |
| 50 | Ab CD73.4-IgG2-C219S | QVQLVESGGGVVQPGRSLRLSCAASGFTFSNYGMHWVRQAPGK |
| | full-length HC | GLEWVAVILYDGSNKYYPDSVKGRFTISRDNSKNTLYLQMNSL |
| | | RAEDTAVYYCARGGSSWYPDSFDIWGQGTMVTVSSASTKGPSV |
| | | FPLAPCSRSTSESTAALGCLVKDYFPEPVTVSWNSGALTSGVH |
| | | TFPAVLQSSGLYSLSSVVTVPSSNFGTQTYTCNVDHKPSNTKV |
| | | DKTVERKSCVECPPCPAPPVAGPSVFLFPPKPKDTLMISRTPE |
| | | VTCVVVDVSHEDPEVQFNWYVDGVEVHNAKTKPREEQFNSTFR |
| | | VVSVLTVVHQDWLNGKEYKCKVSNKGLPAPIEKTISKTKGQPR |
| | | EPQVYTLPPSREEMTKNQVSLTCLVKGFYPSDIAVEWESNGQP |
| | | ENNYKTTPPMLDSDGSFFLYSKLTVDKSRWQQGNVFSCSVMHE |
| | | ALHNHYTQKSLSLSPG |
| 51 | Ab CD73.3-IgG1.1 | EVQLVESGGGLVQPGRSLRLSCAASGFTFDDYAMHWVRQAPGK |
| | full-length HC | GLEWVSGISWKSGSIGYADSVKGRFTISRDNAKNSLYLQMNSL |
| | (IgG1.1- | RAEDTVLYYCVKGYYVILTGLDYWGQGTLVTVSSASTKGPSVF |
| | IgG1.1(L234A/L235E/G237A)- | PLAPSSKSTSGGTAALGCLVKDYFPEPVTVSWNSGALTSGVHT |
| | IgG1.1(A330S/P331S)-IgG1.1) | FPAVLQSSGLYSLSSVVTVPSSSLGTQTYICNVNHKPSNTKVD |
| | | KKVEPKSCDKTHTCPPCPAPEAEGAPSVFLFPPKPKDTLMISR |
| | | TPEVTCVVVDVSHEDPEVKFNWYVDGVEVHNAKTKPREEQYNS |
| | | TYRVVSVLTVLHQDWLNGKEYKCKVSNKALPSSIEKTISKAKG |
| | | QPREPQVYTLPPSREEMTKNQVSLTCLVKGFYPSDIAVEWESN |
| | | GQPENNYKTTPPVLDSDGSFFLYSKLTVDKSRWQQGNVFSCSV |
| | | MHEALHNHYTQKSLSLSPG |
| 52 | Full-length heavy chain | ASTKGPSVFPLAPCSRSTSESTAALGCLVKDYFPEPVTVSWNS |
| | constant region IgG2-IgG2- | GALTSGVHTFPAVLQSSGLYSLSSVVTVPSSNFGTQTYTCNVD |
| | IgG2-IgG2 | HKPSNTKVDKTVERKCCVECPPCPAPPVAGPSVFLFPPKPKDT |
| | | LMISRTPEVTCVVVDVSHEDPEVQFNWYVDGVEVHNAKTKPRE |
| | | EQFNSTFRVVSVLTVVHQDWLNGKEYKCKVSNKGLPAPIEKTI |
| | | SKTKGQPREPQVYTLPPSREEMTKNQVSLTCLVKGFYPSDIAV |
| | | EWESNGQPENNYKTTPPMLDSDGSFFLYSKLTVDKSRWQQGNV |
| | | FSCSVMHEALHNHYTQKSLSLSPGK |
| 53 | Full-length heavy chain | ASTKGPSVFPLAPSSKSTSGGTAALGCLVKDYFPEPVTVSWNS |
| | constant region IgG1-IgG1- | GALTSGVHTFPAVLQSSGLYSLSSVVTVPSSSLGTQTYICNVN |
| | IgG1-IgG1 | HKPSNTKVDKKVEPKSCDKTHTCPPCPAPELLGGPSVFLFPPK |
| | | PKDTLMISRTPEVTCVVVDVSHEDPEVKFNWYVDGVEVHNAKT |
| | | KPREEQYNSTYRVVSVLTVLHQDWLNGKEYKCKVSNKALPAPI |
| | | EKTISKAKGQPREPQVYTLPPSREEMTKNQVSLTCLVKGFYPS |
| | | DIAVEWESNGQPENNYKTTPPVLDSDGSFFLYSKLTVDKSRWQ |
| | | QGNVFSCSVMHEALHNHYTQKSLSLSPGK |
| 54 | Full-length heavy chain | ASTKGPSVFPLAPSSKSTSGGTAALGCLVKDYFPEPVTVSWNS |
| | constant region IgG1- | GALTSGVHTFPAVLQSSGLYSLSSVVTVPSSSLGTQTYICNVN |
| | IgG1.1(L234A/L235E/G237A)- | HKPSNTKVDKKVEPKSCDKTHTCPPCPAPEAEGAPSVFLFPPK |
| | IgG1.1 (A330S/P331S)-IgG1 | PKDTLMISRTPEVTCVVVDVSHEDPEVKFNWYVDGVEVHNAKT |
| | | KPREEQYNSTYRVVSVLTVLHQDWLNGKEYKCKVSNKALPSSI |
| | | EKTISKAKGQPREPQVYTLPPSREEMTKNQVSLTCLVKGFYPS |
| | | DIAVEWESNGQPENNYKTTPPVLDSDGSFFLYSKLTVDKSRWQ |
| | | QGNVFSCSVMHEALHNHYTQKSLSLSPG |
| 55 | Full-length heavy chain | ASTKGPSVFPLAPCSRSTSESTAALGCLVKDYFPEPVTVSWNS |
| | constant region IgG2- | GALTSGVHTFPAVLQSSGLYSLSSVVTVPSSNFGTQTYTCNVD |
| | IgG2/IgG1 hybrid-IgG1-IgG1 | HKPSNTKVDKTVERKCCVECPPCPAPELLGGPSVFLFPPKPKD |
| | | TLMISRTPEVTCVVVDVSHEDPEVKFNWYVDGVEVHNAKTKPR |
| | | EEQYNSTYRVVSVLTVLHQDWLNGKEYKCKVSNKALPAPIEKT |
| | | ISKAKGQPREPQVYTLPPSREEMTKNQVSLTCLVKGFYPSDIA |
| | | VEWESNGQPENNYKTTPPVLDSDGSFFLYSKLTVDKSRWQQGN |
| | | VFSCSVMHEALHNHYTQKSLSLSPG |
| 56 | Full-length heavy chain | ASTKGPSVFPLAPCSRSTSESTAALGCLVKDYFPEPVTVSWNS |
| | constant region IgG2-IgG2- | GALTSGVHTFPAVLQSSGLYSLSSVVTVPSSNFGTQTYTCNVD |
| | IgG1.1(A330/P331S)-IgG1 | HKPSNTKVDKTVERKCCVECPPCPAPPVAGPSVFLFPPKPKDT |
| | | LMISRTPEVTCVVVDVSHEDPEVKFNWYVDGVEVHNAKTKPRE |
| | | EQYNSTYRVVSVLTVLHQDWLNGKEYKCKVSNKALPSSIEKTI |
| | | SKAKGQPREPQVYTLPPSREEMTKNQVSLTCLVKGFYPSDIAV |
| | | EWESNGQPENNYKTTPPVLDSDGSFFLYSKLTVDKSRWQQGNV |
| | | FSCSVMHEALHNHYTQKSLSLSPG |
| 57 | Table 2-hinge domain | VDKRV |
| 58 | Table 2-hinge domain | VDKTV |
| 59 | Table 2-hinge domain | EPKSCDKTHT |
| 60 | Table 2-hinge domain | ERK |
| 61 | Table 2-hinge domain | ELKTPLGDTTHT |
| 62 | Table 2-hinge domain | EPKS |
| 63 | Table 2-hinge domain | ESKYGPP |
| 64 | Table 2-hinge domain | CPPCP |
| 65 | Table 2-hinge domain | CCVECPPCP |
| 66 | Table 2-hinge domain | CPRCP |
| 67 | Table 2-hinge domain | EPKSCDTPPPCPRCP |
| 68 | Table 2-hinge domain | CDTPPPCPRCP |
| 69 | Table 2-hinge domain | CPSCP |
| 70 | Table 2-hinge domain | APELLGG |
| 71 | Table 2-hinge domain | APPVAG |
| 72 | Light chain 11F11 | DIQMTQSPSSLSASVGDRVTITCRASQGISSWLAWYQQKPEKA |
| | | PKSLIYAASSLQSGVPSRFSGSGSGTDFTLTISSLQPEDFATY |
| | | YCQQYNSYPLTFGGGTKVEIKRTVAAPSVFIFPPSDEQLKSGT |
| | | ASVVCLLNNFYPREAKVQWKVDNALQSGNSQESVTEQDSKDST |
| | | YSLSSTLTLSKADYEKHKVYACEVTHQGLSSPVTKSFNRGEC |
| 73 | Light chain 4C3 | EIVLTQSPGTLSLSPGERATLSCRASQSVSSYLAWYQQKPGQA |
| | | PRLLIYGASSRATGIPDRFSGSGSGTDFTLTISRLEPEDFAVY |
| | | YCQQYGSSPLTFGGGTKVEIKRTVAAPSVFIFPPSDEQLKSGT |
| | | ASVVCLLNNFYPREAKVQWKVDNALQSGNSQESVTEQDSKDST |
| | | YSLSSTLTLSKADYEKHKVYACEVTHQGLSSPVTKSFNRGEC |
| 74 | Anti-GITR AbVH | EIVLTQSPGTLSLSPGERATLSCRASQSVSSSYLAWYQQKPGQ |
| | | APRLLIYGASSRATGIPDRFSGSGSGTDFTLTISRLEPEDFAV |
| | | YYCQHYGSSFTFGPGTKVDIKRTVAAPSVFIFPPSDEQLKSGT |
| | | ASVVCLLNNFYPREAKVQWKVDNALQSGNSQESVTEQDSKDST |
| | | YSLSSTLTLSKADYEKHKVYACEVTHQGLSSPVTKSFNRGEC |
| 75 | Anti-GITR AbVH | QVQLVESGGGVVQPGRSLRLSCAASGFTFSSYGMHWVRQAPGK |
| | | GLEWVAVIWYEGSNKYYADSVKGRFTISRDNSKNTLYLQMNSL |
| | | RAEDTAVYYCARGGSMVRGDYYYGMDVWGQGTTVTVSS |
| 76 | Anti-GITR Ab VL | AIQLTQSPSSLSASVGDRVTITCRASQGISSALAWYQQKPGKA |
| | | PKLLIYDASSLESGVPSRFSGSGSGTDFTLTISSLQPEDFATY |
| | | YCQQFNSYPYTFGQGTKLEIK |
| 77 | Anti-GITR Ab LC | AIQLTQSPSSLSASVGDRVTITCRASQGISSALAWYQQKPGKA |
| | | PKLLIYDASSLESGVPSRFSGSGSGTDFTLTISSLQPEDFATY |
| | | YCQQFNSYPYTFGQGTKLEIKRTVAAPSVFIFPPSDEQLKSGT |
| | | ASVVCLLNNFYPREAKVQWKVDNALQSGNSQESVTEQDSKDST |
| | | YSLSSTLTLSKADYEKHKVYACEVTHQGLSSPVTKSFNRGEC |
| 78 | IgG1f | ASTKGPSVFPLAPSSKSTSGGTAALGCLVKDYFPEPVTVSWNS |
| | | GALTSGVHTFPAVLQSSGLYSLSSVVTVPSSSLGTQTYICNVN |
| | | HKPSNTKVDKRVEPKSCDKTHTCPPCPAPELLGGPSVFLFPPK |
| | | PKDTLMISRTPEVTCVVVDVSHEDPEVKFNWYVDGVEVHNAKT |
| | | KPREEQYNSTYRVVSVLTVLHQDWLNGKEYKCKVSNKALPAPI |
| | | EKTISKAKGQPREPQVYTLPPSREEMTKNQVSLTCLVKGFYPS |
| | | DIAVEWESNGQPENNYKTTPPVLDSDGSFFLYSKLTVDKSRWQ |
| | | QGNVFSCSVMHEALHNHYTQKSLSLSPGK |
| 79 | IgG2.3 | ASTKGPSVFPLAPCSRSTSESTAALGCLVKDYFPEPVTVSWNS |
| | | GALTSGVHTFPAVLQSSGLYSLSSVVTVPSSNFGTQTYTCNVD |
| | | HKPSNTKVDKTVERKSCVECPPCPAPPVAGPSVFLFPPKPKDT |
| | | LMISRTPEVTCVVVDVSHEDPEVQFNWYVDGVEVHNAKTKPRE |
| | | EQFNSTFRVVSVLTVVHQDWLNGKEYKCKVSNKGLPAPIEKTI |
| | | SKTKGQPREPQVYTLPPSREEMTKNQVSLTCLVKGFYPSDIAV |
| | | EWESNGQPENNYKTTPPMLDSDGSFFLYSKLTVDKSRWQQGNV |
| | | FSCSVMHEALHNHYTQKSLSLSPGK |
| 80 | IgG2.3G1-AY | ASTKGPSVFPLAPCSRSTSESTAALGCLVKDYFPEPVTVSWNS |
| | | GALTSGVHTFPAVLQSSGLYSLSSVVTVPSSNFGTQTYTCNVD |
| | | HKPSNTKVDKTVERKSCVECPPCPAPELLGGPSVFLFPPKPKD |
| | | TLMISRTPEVTCVVVDVSHEDPEVKFNWYVDGVEVHNAKTKPR |
| | | EEQYNSTYRVVSVLTVLHQDWLNGKEYKCKVSNKALPAPIEKT |
| | | ISKAKGQPREPQVYTLPPSREEMTKNQVSLTCLVKGFYPSDIA |
| | | VEWESNGQPENNYKTTPPVLDSDGSFFLYSKLTVDKSRWQQGN |
| | | VFSCSVMHEALHNHYTQKSLSLSPGK |
| 81 | IgG2.3G1-KH | ASTKGPSVFPLAPCSRSTSESTAALGCLVKDYFPEPVTVSWNS |
| | | GALTSGVHTFPAVLQSSGLYSLSSVVTVPSSNFGTQTYTCNVD |
| | | HKPSNTKVDKTVERKSCVECPPCPAPPVAGPSVFLFPPKPKDT |
| | | LMISRTPEVTCVVVDVSHEDPEVKFNWYVDGVEVHNAKTKPRE |
| | | EQYNSTYRVVSVLTVLHQDWLNGKEYKCKVSNKALPAPIEKTI |
| | | SKAKGQPREPQVYTLPPSREEMTKNQVSLTCLVKGFYPSDIAV |
| | | EWESNGQPENNYKTTPPVLDSDGSFFLYSKLTVDKSRWQQGNV |
| | | FSCSVMHEALHNHYTQKSLSLSPGK |
| 82 | IgG2.5 | ASTKGPSVFPLAPSSRSTSESTAALGCLVKDYFPEPVTVSWNS |
| | | GALTSGVHTFPAVLQSSGLYSLSSVVTVPSSNFGTQTYTCNVD |
| | | HKPSNTKVDKTVERKCCVECPPCPAPPVAGPSVFLFPPKPKDT |
| | | LMISRTPEVTCVVVDVSHEDPEVQFNWYVDGVEVHNAKTKPRE |
| | | EQFNSTFRVVSVLTVVHQDWLNGKEYKCKVSNKGLPAPIEKTI |
| | | SKTKGQPREPQVYTLPPSREEMTKNQVSLTCLVKGFYPSDIAV |
| | | EWESNGQPENNYKTTPPMLDSDGSFFLYSKLTVDKSRWQQGNV |
| | | FSCSVMHEALHNHYTQKSLSLSPGK |
| 83 | IgG1.1f | ASTKGPSVFPLAPSSKSTSGGTAALGCLVKDYFPEPVTVSWNS |
| | | GALTSGVHTFPAVLQSSGLYSLSSVVTVPSSSLGTQTYICNVN |
| | | HKPSNTKVDKRVEPKSCDKTHTCPPCPAPEAEGAPSVFLFPPK |
| | | PKDTLMISRTPEVTCVVVDVSHEDPEVKFNWYVDGVEVHNAKT |
| | | KPREEQYNSTYRVVSVLTVLHQDWLNGKEYKCKVSNKALPSSI |
| | | EKTISKAKGQPREPQVYTLPPSREEMTKNQVSLTCLVKGFYPS |
| | | DIAVEWESNGQPENNYKTTPPVLDSDGSFFLYSKLTVDKSRWQ |
| | | QGNVFSCSVMHEALHNHYTQKSLSLSPGK |
| 84 | IgG2.3G1.1f-KH | ASTKGPSVFPLAPCSRSTSESTAALGCLVKDYFPEPVTVSWNS |
| | | GALTSGVHTFPAVLQSSGLYSLSSVVTVPSSNFGTQTYTCNVD |
| | | HKPSNTKVDKTVERKSCVECPPCPAPPVAGPSVFLFPPKPKDT |
| | | LMISRTPEVTCVVVDVSHEDPEVKFNWYVDGVEVHNAKTKPRE |
| | | EQYNSTYRVVSVLTVLHQDWLNGKEYKCKVSNKALPSSIEKTI |
| | | SKAKGQPREPQVYTLPPSREEMTKNQVSLTCLVKGFYPSDIAV |
| | | EWESNGQPENNYKTTPPVLDSDGSFFLYSKLTVDKSRWQQGNV |
| | | FSCSVMHEALHNHYTQKSLSLSPGK |
| 85 | IgG1-deltaTHT | ASTKGPSVFPLAPSSKSTSGGTAALGCLVKDYFPEPVTVSWNS |
| | | GALTSGVHTFPAVLQSSGLYSLSSVVTVPSSSLGTQTYICNVN |
| | | HKPSNTKVDKRVEPKSCDKCPPCPAPELLGGPSVFLFPPKPKD |
| | | TLMISRTPEVTCVVVDVSHEDPEVKFNWYVDGVEVHNAKTKPR |
| | | EEQYNSTYRVVSVLTVLHQDWLNGKEYKCKVSNKALPAPIEKT |
| | | ISKAKGQPREPQVYTLPPSREEMTKNQVSLTCLVKGFYPSDIA |
| | | VEWESNGQPENNYKTTPPVLDSDGSFFLYSKLTVDKSRWQQGN |
| | | VFSCSVMHEALHNHYTQKSLSLSPGK |
| 86 | IgG2.3-plusTHT | ASTKGPSVFPLAPCSRSTSESTAALGCLVKDYFPEPVTVSWNS |
| | | GALTSGVHTFPAVLQSSGLYSLSSVVTVPSSNFGTQTYTCNVD |
| | | HKPSNTKVDKTVERKSCVETHTCPPCPAPPVAGPSVFLFPPKP |
| | | KDTLMISRTPEVTCVVVDVSHEDPEVQFNWYVDGVEVHNAKTK |
| | | PREEQFNSTFRVVSVLTVVHQDWLNGKEYKCKVSNKGLPAPIE |
| | | KTISKTKGQPREPQVYTLPPSREEMTKNQVSLTCLVKGFYPSD |
| | | IAVEWESNGQPENNYKTTPPMLDSDGSFFLYSKLTVDKSRWQQ |
| | | GNVFSCSVMHEALHNHYTQKSLSLSPGK |
| 87 | IgG2.3-plusGGG | ASTKGPSVFPLAPCSRSTSESTAALGCLVKDYFPEPVTVSWNS |
| | | GALTSGVHTFPAVLQSSGLYSLSSVVTVPSSNFGTQTYTCNVD |
| | | HKPSNTKVDKTVERKSCVEGGGCPPCPAPPVAGPSVFLFPPKP |
| | | KDTLMISRTPEVTCVVVDVSHEDPEVQFNWYVDGVEVHNAKTK |
| | | PREEQFNSTFRVVSVLTVVHQDWLNGKEYKCKVSNKGLPAPIE |
| | | KTISKTKGQPREPQVYTLPPSREEMTKNQVSLTCLVKGFYPSD |
| | | IAVEWESNGQPENNYKTTPPMLDSDGSFFLYSKLTVDKSRWQQ |
| | | GNVFSCSVMHEALHNHYTQKSLSLSPGK |
| 88 | IgG2.5G1.1f-KH | ASTKGPSVFPLAPSSRSTSESTAALGCLVKDYFPEPVTVSWNS |
| | | GALTSGVHTFPAVLQSSGLYSLSSVVTVPSSNFGTQTYTCNVD |
| | | HKPSNTKVDKTVERKCCVECPPCPAPPVAGPSVFLFPPKPKDT |
| | | LMISRTPEVTCVVVDVSHEDPEVKFNWYVDGVEVHNAKTKPRE |
| | | EQYNSTYRVVSVLTVLHQDWLNGKEYKCKVSNKALPSSIEKTI |
| | | SKAKGQPREPQVYTLPPSREEMTKNQVSLTCLVKGFYPSDIAV |
| | | EWESNGQPENNYKTTPPVLDSDGSFFLYSKLTVDKSRWQQGNV |
| | | FSCSVMHEALHNHYTQKSLSLSPGK |
| 89 | IgG2.5G1-AY | ASTKGPSVFPLAPSSRSTSESTAALGCLVKDYFPEPVTVSWNS |
| | | GALTSGVHTFPAVLQSSGLYSLSSVVTVPSSNFGTQTYTCNVD |
| | | HKPSNTKVDKTVERKCCVECPPCPAPELLGGPSVFLFPPKPKD |
| | | TLMISRTPEVTCVVVDVSHEDPEVKFNWYVDGVEVHNAKTKPR |
| | | EEQYNSTYRVVSVLTVLHQDWLNGKEYKCKVSNKALPAPIEKT |
| | | ISKAKGQPREPQVYTLPPSREEMTKNQVSLTCLVKGFYPSDIA |
| | | VEWESNGQPENNYKTTPPVLDSDGSFFLYSKLTVDKSRWQQGN |
| | | VFSCSVMHEALHNHYTQKSLSLSPGK |
| 90 | IgG2.5G1-KH | ASTKGPSVFPLAPSSRSTSESTAALGCLVKDYFPEPVTVSWNS |
| | | GALTSGVHTFPAVLQSSGLYSLSSVVTVPSSNFGTQTYTCNVD |
| | | HKPSNTKVDKTVERKCCVECPPCPAPPVAGPSVFLFPPKPKDT |
| | | LMISRTPEVTCVVVDVSHEDPEVKFNWYVDGVEVHNAKTKPRE |
| | | EQYNSTYRVVSVLTVLHQDWLNGKEYKCKVSNKALPAPIEKTI |
| | | SKAKGQPREPQVYTLPPSREEMTKNQVSLTCLVKGFYPSDIAV |
| | | EWESNGQPENNYKTTPPVLDSDGSFFLYSKLTVDKSRWQQGNV |
| | | FSCSVMHEALHNHYTQKSLSLSPGK |
| 91 | IgG2.5-plusTHT | ASTKGPSVFPLAPSSRSTSESTAALGCLVKDYFPEPVTVSWNS |
| | | GALTSGVHTFPAVLQSSGLYSLSSVVTVPSSNFGTQTYTCNVD |
| | | HKPSNTKVDKTVERKCCVETHTCPPCPAPPVAGPSVFLFPPKP |
| | | KDTLMISRTPEVTCVVVDVSHEDPEVQFNWYVDGVEVHNAKTK |
| | | PREEQFNSTFRVVSVLTVVHQDWLNGKEYKCKVSNKGLPAPIE |
| | | KTISKTKGQPREPQVYTLPPSREEMTKNQVSLTCLVKGFYPSD |
| | | IAVEWESNGQPENNYKTTPPMLDSDGSFFLYSKLTVDKSRWQQ |
| | | GNVFSCSVMHEALHNHYTQKSLSLSPGK |
| 92 | IgG1-G2.3G1-AY | ASTKGPSVFPLAPSSKSTSGGTAALGCLVKDYFPEPVTVSWNS |
| | | GALTSGVHTFPAVLQSSGLYSLSSVVTVPSSSLGTQTYICNVN |
| | | HKPSNTKVDKRVERKSCVECPPCPAPELLGGPSVFLFPPKPKD |
| | | TLMISRTPEVTCVVVDVSHEDPEVKFNWYVDGVEVHNAKTKPR |
| | | EEQYNSTYRVVSVLTVLHQDWLNGKEYKCKVSNKALPAPIEKT |
| | | ISKAKGQPREPQVYTLPPSREEMTKNQVSLTCLVKGFYPSDIA |
| | | VEWESNGQPENNYKTTPPVLDSDGSFFLYSKLTVDKSRWQQGN |
| | | VFSCSVMHEALHNHYTQKSLSLSPGK |
| 93 | IgG1-G2.3G1-KH | ASTKGPSVFPLAPSSKSTSGGTAALGCLVKDYFPEPVTVSWNS |
| | | GALTSGVHTFPAVLQSSGLYSLSSVVTVPSSSLGTQTYICNVN |
| | | HKPSNTKVDKRVERKSCVECPPCPAPPVAGPSVFLFPPKPKDT |
| | | LMISRTPEVTCVVVDVSHEDPEVKFNWYVDGVEVHNAKTKPRE |
| | | EQYNSTYRVVSVLTVLHQDWLNGKEYKCKVSNKALPAPIEKTI |
| | | SKAKGQPREPQVYTLPPSREEMTKNQVSLTCLVKGFYPSDIAV |
| | | EWESNGQPENNYKTTPPVLDSDGSFFLYSKLTVDKSRWQQGNV |
| | | FSCSVMHEALHNHYTQKSLSLSPGK |
| 94 | G2-G1-G1-G1 | ASTKGPSVFPLAPCSRSTSESTAALGCLVKDYFPEPVTVSWNS |
| | | GALTSGVHTFPAVLQSSGLYSLSSVVTVPSSNFGTQTYTCNVD |
| | | HKPSNTKVDKTVERKSCDKTHTCPPCPAPELLGGPSVFLFPPK |
| | | PKDTLMISRTPEVTCVVVDVSHEDPEVKFNWYVDGVEVHNAKT |
| | | KPREEQYNSTYRVVSVLTVLHQDWLNGKEYKCKVSNKALPAPI |
| | | EKTISKAKGQPREPQVYTLPPSREEMTKNQVSLTCLVKGFYPS |
| | | DIAVEWESNGQPENNYKTTPPVLDSDGSFFLYSKLTVDKSRWQ |
| | | QGNVFSCSVMHEALHNHYTQKSLSLSPGK |
| 95 | G2.5-G1-G1-G1 | ASTKGPSVFPLAPSSRSTSESTAALGCLVKDYFPEPVTVSWNS |
| | | GALTSGVHTFPAVLQSSGLYSLSSVVTVPSSNFGTQTYTCNVD |
| | | HKPSNTKVDKTVERKSCDKTHTCPPCPAPELLGGPSVFLFPPK |
| | | PKDTLMISRTPEVTCVVVDVSHEDPEVKFNWYVDGVEVHNAKT |
| | | KPREEQYNSTYRVVSVLTVLHQDWLNGKEYKCKVSNKALPAPI |
| | | EKTISKAKGQPREPQVYTLPPSREEMTKNQVSLTCLVKGFYPS |
| | | DIAVEWESNGQPENNYKTTPPVLDSDGSFFLYSKLTVDKSRWQ |
| | | QGNVFSCSVMHEALHNHYTQKSLSLSPGK |
| 96 | G1-G2.3-G2-G2 | ASTKGPSVFPLAPSSKSTSGGTAALGCLVKDYFPEPVTVSWNS |
| | | GALTSGVHTFPAVLQSSGLYSLSSVVTVPSSSLGTQTYICNVN |
| | | HKPSNTKVDKRVEPKSCVECPPCPAPPVAGPSVFLFPPKPKDT |
| | | LMISRTPEVTCVVVDVSHEDPEVQFNWYVDGVEVHNAKTKPRE |
| | | EQFNSTFRVVSVLTVVHQDWLNGKEYKCKVSNKGLPAPIEKTI |
| | | SKTKGQPREPQVYTLPPSREEMTKNQVSLTCLVKGFYPSDIAV |
| | | EWESNGQPENNYKTTPPMLDSDGSFFLYSKLTVDKSRWQQGNV |
| | | FSCSVMHEALHNHYTQKSLSLSPGK |
| 97 | G1-KRGEGSSNLF | ASTKGPSVFPLAPSSRSTSESTAALGCLVKDYFPEPVTVSWNS |
| | | GALTSGVHTFPAVLQSSGLYSLSSVVTVPSSNFGTQTYICNVN |
| | | HKPSNTKVDKRVEPKSCDKTHTCPPCPAPELLGGPSVFLFPPK |
| | | PKDTLMISRTPEVTCVVVDVSHEDPEVKFNWYVDGVEVHNAKT |
| | | KPREEQYNSTYRVVSVLTVLHQDWLNGKEYKCKVSNKALPAPI |
| | | EKTISKAKGQPREPQVYTLPPSREEMTKNQVSLTCLVKGFYPS |
| | | DIAVEWESNGQPENNYKTTPPVLDSDGSFFLYSKLTVDKSRWQ |
| | | QGNVFSCSVMHEALHNHYTQKSLSLSPGK |
| 98 | G1-KRGEGS | ASTKGPSVFPLAPSSRSTSESTAALGCLVKDYFPEPVTVSWNS |
| | | GALTSGVHTFPAVLQSSGLYSLSSVVTVPSSSLGTQTYICNVN |
| | | HKPSNTKVDKRVEPKSCDKTHTCPPCPAPELLGGPSVFLFPPK |
| | | PKDTLMISRTPEVTCVVVDVSHEDPEVKFNWYVDGVEVHNAKT |
| | | KPREEQYNSTYRVVSVLTVLHQDWLNGKEYKCKVSNKALPAPI |
| | | EKTISKAKGQPREPQVYTLPPSREEMTKNQVSLTCLVKGFYPS |
| | | DIAVEWESNGQPENNYKTTPPVLDSDGSFFLYSKLTVDKSRWQ |
| | | QGNVFSCSVMHEALHNHYTQKSLSLSPGK |
| 99 | G1-SNLF | ASTKGPSVFPLAPSSKSTSGGTAALGCLVKDYFPEPVTVSWNS |
| | | GALTSGVHTFPAVLQSSGLYSLSSVVTVPSSNFGTQTYICNVN |
| | | HKPSNTKVDKRVEPKSCDKTHTCPPCPAPELLGGPSVFLFPPK |
| | | PKDTLMISRTPEVTCVVVDVSHEDPEVKFNWYVDGVEVHNAKT |
| | | KPREEQYNSTYRVVSVLTVLHQDWLNGKEYKCKVSNKALPAPI |
| | | EKTISKAKGQPREPQVYTLPPSREEMTKNQVSLTCLVKGFYPS |
| | | DIAVEWESNGQPENNYKTTPPVLDSDGSFFLYSKLTVDKSRWQ |
| | | QGNVFSCSVMHEALHNHYTQKSLSLSPGK |
| 100 | IgG1-ITNDRTPR | ASTKGPSVFPLAPSSKSTSGGTAALGCLVKDYFPEPVTVSWNS |
| | | GALTSGVHTFPAVLQSSGLYSLSSVVTVPSSSLGTQTYTCNVD |
| | | HKPSNTKVDKTVERKSCDKTHTCPPCPAPELLGGPSVFLFPPK |
| | | PKDTLMISRTPEVTCVVVDVSHEDPEVKFNWYVDGVEVHNAKT |
| | | KPREEQYNSTYRVVSVLTVLHQDWLNGKEYKCKVSNKALPAPI |
| | | EKTISKAKGQPREPQVYTLPPSREEMTKNQVSLTCLVKGFYPS |
| | | DIAVEWESNGQPENNYKTTPPVLDSDGSFFLYSKLTVDKSRWQ |
| | | QGNVFSCSVMHEALHNHYTQKSLSLSPGK |
| 101 | G1-SNLFPR | ASTKGPSVFPLAPSSKSTSGGTAALGCLVKDYFPEPVTVSWNS |
| | | GALTSGVHTFPAVLQSSGLYSLSSVVTVPSSNFGTQTYICNVN |
| | | HKPSNTKVDKRVERKSCDKTHTCPPCPAPELLGGPSVFLFPPK |
| | | PKDTLMISRTPEVTCVVVDVSHEDPEVKFNWYVDGVEVHNAKT |
| | | KPREEQYNSTYRVVSVLTVLHQDWLNGKEYKCKVSNKALPAPI |
| | | EKTISKAKGQPREPQVYTLPPSREEMTKNQVSLTCLVKGFYPS |
| | | DIAVEWESNGQPENNYKTTPPVLDSDGSFFLYSKLTVDKSRWQ |
| | | QGNVFSCSVMHEALHNHYTQKSLSLSPG |
| 102 | G2-RKEGSGNSFL | ASTKGPSVFPLAPCSKSTSGGTAALGCLVKDYFPEPVTVSWNS |
| | | GALTSGVHTFPAVLQSSGLYSLSSVVTVPSSSLGTQTYTCNVD |
| | | HKPSNTKVDKTVERKSCVECPPCPAPPVAGPSVFLFPPKPKDT |
| | | LMISRTPEVTCVVVDVSHEDPEVQFNWYVDGVEVHNAKTKPRE |
| | | EQFNSTFRVVSVLTVVHQDWLNGKEYKCKVSNKGLPAPIEKTI |
| | | SKTKGQPREPQVYTLPPSREEMTKNQVSLTCLVKGFYPSDIAV |
| | | EWESNGQPENNYKTTPPMLDSDGSFFLYSKLTVDKSRWQQGNV |
| | | FSCSVMHEALHNHYTQKSLSLSPGK |
| 103 | G2-RKEGSG | ASTKGPSVFPLAPCSKSTSGGTAALGCLVKDYFPEPVTVSWNS |
| | | GALTSGVHTFPAVLQSSGLYSLSSVVTVPSSNFGTQTYTCNVD |
| | | HKPSNTKVDKTVERKSCVECPPCPAPPVAGPSVFLFPPKPKDT |
| | | LMISRTPEVTCVVVDVSHEDPEVQFNWYVDGVEVHNAKTKPRE |
| | | EQFNSTFRVVSVLTVVHQDWLNGKEYKCKVSNKGLPAPIEKTI |
| | | SKTKGQPREPQVYTLPPSREEMTKNQVSLTCLVKGFYPSDIAV |
| | | EWESNGQPENNYKTTPPMLDSDGSFFLYSKLTVDKSRWQQGNV |
| | | FSCSVMHEALHNHYTQKSLSLSPGK |
| 104 | G2-NSFL | ASTKGPSVFPLAPCSRSTSESTAALGCLVKDYFPEPVTVSWNS |
| | | GALTSGVHTFPAVLQSSGLYSLSSVVTVPSSSLGTQTYTCNVD |
| | | HKPSNTKVDKTVERKSCVECPPCPAPPVAGPSVFLFPPKPKDT |
| | | LMISRTPEVTCVVVDVSHEDPEVQFNWYVDGVEVHNAKTKPRE |
| | | EQFNSTFRVVSVLTVVHQDWLNGKEYKCKVSNKGLPAPIEKTI |
| | | SKTKGQPREPQVYTLPPSREEMTKNQVSLTCLVKGFYPSDIAV |
| | | EWESNGQPENNYKTTPPMLDSDGSFFLYSKLTVDKSRWQQGNV |
| | | FSCSVMHEALHNHYTQKSLSLSPGK |
| 105 | IgG2-TIDNTRRP | ASTKGPSVFPLAPCSRSTSESTAALGCLVKDYFPEPVTVSWNS |
| | | GALTSGVHTFPAVLQSSGLYSLSSVVTVPSSNFGTQTYICNVN |
| | | HKPSNTKVDKRVEPKSCVECPPCPAPPVAGPSVFLFPPKPKDT |
| | | LMISRTPEVTCVVVDVSHEDPEVQFNWYVDGVEVHNAKTKPRE |
| | | EQFNSTFRVVSVLTVVHQDWLNGKEYKCKVSNKGLPAPIEKTI |
| | | SKTKGQPREPQVYTLPPSREEMTKNQVSLTCLVKGFYPSDIAV |
| | | EWESNGQPENNYKTTPPMLDSDGSFFLYSKLTVDKSRWQQGNV |
| | | FSCSVMHEALHNHYTQKSLSLSPGK |
| 106 | G2-NSFLRP | ASTKGPSVFPLAPCSRSTSESTAALGCLVKDYFPEPVTVSWNS |
| | | GALTSGVHTFPAVLQSSGLYSLSSVVTVPSSSLGTQTYTCNVD |
| | | HKPSNTKVDKTVEPKSCVECPPCPAPPVAGPSVFLFPPKPKDT |
| | | LMISRTPEVTCVVVDVSHEDPEVQFNWYVDGVEVHNAKTKPRE |
| | | EQFNSTFRVVSVLTVVHQDWLNGKEYKCKVSNKGLPAPIEKTI |
| | | SKTKGQPREPQVYTLPPSREEMTKNQVSLTCLVKGFYPSDIAV |
| | | EWESNGQPENNYKTTPPMLDSDGSFFLYSKLTVDKSRWQQGNV |
| | | FSCSVMHEALHNHYTQKSLSLSPGK |
| 107 | G1-G1-G2-G1-AY | ASTKGPSVFPLAPSSKSTSGGTAALGCLVKDYFPEPVTVSWNS |
| | | GALTSGVHTFPAVLQSSGLYSLSSVVTVPSSSLGTQTYICNVN |
| | | HKPSNTKVDKRVEPKSCDKTHTCPPCPAPELLGGPSVFLFPPK |
| | | PKDTLMISRTPEVTCVVVDVSHEDPEVQFNWYVDGVEVHNAKT |
| | | KPREEQFNSTFRVVSVLTVVHQDWLNGKEYKCKVSNKGLPAPI |
| | | EKTISKTKGQPREPQVYTLPPSREEMTKNQVSLTCLVKGFYPS |
| | | DIAVEWESNGQPENNYKTTPPVLDSDGSFFLYSKLTVDKSRWQ |
| | | QGNVFSCSVMHEALHNHYTQKSLSLSPGK |
| 108 | G1-G1-G2-G1-KH | ASTKGPSVFPLAPSSKSTSGGTAALGCLVKDYFPEPVTVSWNS |
| | | GALTSGVHTFPAVLQSSGLYSLSSVVTVPSSSLGTQTYICNVN |
| | | HKPSNTKVDKRVEPKSCDKTHTCPPCPAPPVAGPSVFLFPPKP |
| | | KDTLMISRTPEVTCVVVDVSHEDPEVQFNWYVDGVEVHNAKTK |
| | | PREEQFNSTFRVVSVLTVVHQDWLNGKEYKCKVSNKGLPAPIE |
| | | KTISKTKGQPREPQVYTLPPSREEMTKNQVSLTCLVKGFYPSD |
| | | IAVEWESNGQPENNYKTTPPVLDSDGSFFLYSKLTVDKSRWQQ |
| | | GNVFSCSVMHEALHNHYTQKSLSLSPGK |
| 109 | G2-G2.3-G1-G2-KH | ASTKGPSVFPLAPCSRSTSESTAALGCLVKDYFPEPVTVSWNS |
| | | GALTSGVHTFPAVLQSSGLYSLSSVVTVPSSNFGTQTYTCNVD |
| | | HKPSNTKVDKTVERKSCVECPPCPAPPVAGPSVFLFPPKPKDT |
| | | LMISRTPEVTCVVVDVSHEDPEVKFNWYVDGVEVHNAKTKPRE |
| | | EQYNSTYRVVSVLTVLHQDWLNGKEYKCKVSNKALPAPIEKTI |
| | | SKAKGQPREPQVYTLPPSREEMTKNQVSLTCLVKGFYPSDIAV |
| | | EWESNGQPENNYKTTPPMLDSDGSFFLYSKLTVDKSRWQQGNV |
| | | FSCSVMHEALHNHYTQKSLSLSPGK |
| 110 | G2.5-G2.3-G1-G2-KH | ASTKGPSVFPLAPSSRSTSESTAALGCLVKDYFPEPVTVSWNS |
| | | GALTSGVHTFPAVLQSSGLYSLSSVVTVPSSNFGTQTYTCNVD |
| | | HKPSNTKVDKTVERKSCVECPPCPAPPVAGPSVFLFPPKPKDT |
| | | LMISRTPEVTCVVVDVSHEDPEVKFNWYVDGVEVHNAKTKPRE |
| | | EQYNSTYRVVSVLTVLHQDWLNGKEYKCKVSNKALPAPIEKTI |
| | | SKAKGQPREPQVYTLPPSREEMTKNQVSLTCLVKGFYPSDIAV |
| | | EWESNGQPENNYKTTPPMLDSDGSFFLYSKLTVDKSRWQQGNV |
| | | FSCSVMHEALHNHYTQKSLSLSPGK |
| 111 | G2-G2.3-G1-G2-AY | ASTKGPSVFPLAPCSRSTSESTAALGCLVKDYFPEPVTVSWNS |
| | | GALTSGVHTFPAVLQSSGLYSLSSVVTVPSSNFGTQTYTCNVD |
| | | HKPSNTKVDKTVERKSCVECPPCPAPELLGGPSVFLFPPKPKD |
| | | TLMISRTPEVTCVVVDVSHEDPEVKFNWYVDGVEVHNAKTKPR |
| | | EEQYNSTYRVVSVLTVLHQDWLNGKEYKCKVSNKALPAPIEKT |
| | | ISKAKGQPREPQVYTLPPSREEMTKNQVSLTCLVKGFYPSDIA |
| | | VEWESNGQPENNYKTTPPMLDSDGSFFLYSKLTVDKSRWQQGN |
| | | VFSCSVMHEALHNHYTQKSLSLSPG |
| 112 | G2.5-G2.3-G1-G2-AY | ASTKGPSVFPLAPSSRSTSESTAALGCLVKDYFPEPVTVSWNS |
| | | GALTSGVHTFPAVLQSSGLYSLSSVVTVPSSNFGTQTYTCNVD |
| | | HKPSNTKVDKTVERKSCVECPPCPAPELLGGPSVFLFPPKPKD |
| | | TLMISRTPEVTCVVVDVSHEDPEVKFNWYVDGVEVHNAKTKPR |
| | | EEQYNSTYRVVSVLTVLHQDWLNGKEYKCKVSNKALPAPIEKT |
| | | ISKAKGQPREPQVYTLPPSREEMTKNQVSLTCLVKGFYPSDIA |
| | | VEWESNGQPENNYKTTPPMLDSDGSFFLYSKLTVDKSRWQQGN |
| | | VFSCSVMHEALHNHYTQKSLSLSPGK |
| 113 | G1-G2.3-G1-G1-KH | ASTKGPSVFPLAPSSKSTSGGTAALGCLVKDYFPEPVTVSWNS |
| | | GALTSGVHTFPAVLQSSGLYSLSSVVTVPSSSLGTQTYICNVN |
| | | HKPSNTKVDKRVEPKSCVECPPCPAPPVAGPSVFLFPPKPKDT |
| | | LMISRTPEVTCVVVDVSHEDPEVKFNWYVDGVEVHNAKTKPRE |
| | | EQYNSTYRVVSVLTVLHQDWLNGKEYKCKVSNKALPAPIEKTI |
| | | SKAKGQPREPQVYTLPPSREEMTKNQVSLTCLVKGFYPSDIAV |
| | | EWESNGQPENNYKTTPPVLDSDGSFFLYSKLTVDKSRWQQGNV |
| | | FSCSVMHEALHNHYTQKSLSLSPGK |
| 114 | G2-G1-G2-G2-AY | ASTKGPSVFPLAPCSRSTSESTAALGCLVKDYFPEPVTVSWNS |
| | | GALTSGVHTFPAVLQSSGLYSLSSVVTVPSSNFGTQTYTCNVD |
| | | HKPSNTKVDKTVERKSCDKTHTCPPCPAPELLGGPSVFLFPPK |
| | | PKDTLMISRTPEVTCVVVDVSHEDPEVQFNWYVDGVEVHNAKT |
| | | KPREEQFNSTFRVVSVLTVVHQDWLNGKEYKCKVSNKGLPAPI |
| | | EKTISKTKGQPREPQVYTLPPSREEMTKNQVSLTCLVKGFYPS |
| | | DIAVEWESNGQPENNYKTTPPMLDSDGSFFLYSKLTVDKSRWQ |
| | | QGNVFSCSVMHEALHNHYTQKSLSLSPGK |
| 115 | G2.5-G1-G2-G2-AY | ASTKGPSVFPLAPSSRSTSESTAALGCLVKDYFPEPVTVSWNS |
| | | GALTSGVHTFPAVLQSSGLYSLSSVVTVPSSNFGTQTYTCNVD |
| | | HKPSNTKVDKTVERKSCDKTHTCPPCPAPELLGGPSVFLFPPK |
| | | PKDTLMISRTPEVTCVVVDVSHEDPEVQFNWYVDGVEVHNAKT |
| | | KPREEQFNSTFRVVSVLTVVHQDWLNGKEYKCKVSNKGLPAPI |
| | | EKTISKTKGQPREPQVYTLPPSREEMTKNQVSLTCLVKGFYPS |
| | | DIAVEWESNGQPENNYKTTPPMLDSDGSFFLYSKLTVDKSRWQ |
| | | QGNVFSCSVMHEALHNHYTQKSLSLSPGK |
| 116 | G1-G2-G1-G1-AY | ASTKGPSVFPLAPSSKSTSGGTAALGCLVKDYFPEPVTVSWNS |
| | | GALTSGVHTFPAVLQSSGLYSLSSVVTVPSSSLGTQTYICNVN |
| | | HKPSNTKVDKRVEPKSCVECPPCPAPELLGGPSVFLFPPKPKD |
| | | TLMISRTPEVTCVVVDVSHEDPEVKFNWYVDGVEVHNAKTKPR |
| | | EEQYNSTYRVVSVLTVLHQDWLNGKEYKCKVSNKALPAPIEKT |
| | | ISKAKGQPREPQVYTLPPSREEMTKNQVSLTCLVKGFYPSDIA |
| | | VEWESNGQPENNYKTTPPVLDSDGSFFLYSKLTVDKSRWQQGN |
| | | VFSCSVMHEALHNHYTQKSLSLSPGK |
| 117 | G2-G1-G2-G2-KH | ASTKGPSVFPLAPCSRSTSESTAALGCLVKDYFPEPVTVSWN |
| | | SGALTSGVHTFPAVLQSSGLYSLSSVVTVPSSNFGTQTYTCN |
| | | VDHKPSNTKVDKTVERKSCDKTHTCPPCPAPPVAGPSVFLFP |
| | | PKPKDTLMISRTPEVTCVVVDVSHEDPEVQFNWYVDGVEVHN |
| | | AKTKPREEQFNSTFRVVSVLTVVHQDWLNGKEYKCKVSNKGL |
| | | PAPIEKTISKTKGQPREPQVYTLPPSREEMTKNQVSLTCLVK |
| | | GFYPSDIAVEWESNGQPENNYKTTPPMLDSDGSFFLYSKLTV |
| | | DKSRWQQGNVFSCSVMHEALHNHYTQKSLSLSPG |
| 118 | G2.5-G1-G2-G2-KH | ASTKGPSVFPLAPSSRSTSESTAALGCLVKDYFPEPVTVSWNS |
| | | GALTSGVHTFPAVLQSSGLYSLSSVVTVPSSNFGTQTYTCNVD |
| | | HKPSNTKVDKTVERKSCDKTHTCPPCPAPPVAGPSVFLFPPKP |
| | | KDTLMISRTPEVTCVVVDVSHEDPEVQFNWYVDGVEVHNAKTK |
| | | PREEQFNSTFRVVSVLTVVHQDWLNGKEYKCKVSNKGLPAPIE |
| | | KTISKTKGQPREPQVYTLPPSREEMTKNQVSLTCLVKGFYPSD |
| | | IAVEWESNGQPENNYKTTPPMLDSDGSFFLYSKLTVDKSRWQQ |
| | | GNVFSCSVMHEALHNHYTQKSLSLSPGK |
| 119 | IgG1-deltaHinge | ASTKGPSVFPLAPSSKSTSGGTAALGCLVKDYFPEPVTVSWNS |
| | | GALTSGVHTFPAVLQSSGLYSLSSVVTVPSSSLGTQTYICNVN |
| | | HKPSNTKVDKRVEPKCPPCPAPELLGGPSVFLFPPKPKDTLMI |
| | | SRTPEVTCVVVDVSHEDPEVKFNWYVDGVEVHNAKTKPREEQY |
| | | NSTYRVVSVLTVLHQDWLNGKEYKCKVSNKALPAPIEKTISKA |
| | | KGQPREPQVYTLPPSREEMTKNQVSLTCLVKGFYPSDIAVEWE |
| | | SNGQPENNYKTTPPVLDSDGSFFLYSKLTVDKSRWQQGNVFSC |
| | | SVMHEALHNHYTQKSLSLSPGK |
| 120 | IgG2-deltaHinge | ASTKGPSVFPLAPCSRSTSESTAALGCLVKDYFPEPVTVSWNS |
| | | GALTSGVHTFPAVLQSSGLYSLSSVVTVPSSNFGTQTYTCNVD |
| | | HKPSNTKVDKTVERKCPPCPAPPVAGPSVFLFPPKPKDTLMIS |
| | | RTPEVTCVVVDVSHEDPEVQFNWYVDGVEVHNAKTKPREEQFN |
| | | STFRVVSVLTVVHQDWLNGKEYKCKVSNKGLPAPIEKTISKTK |
| | | GQPREPQVYTLPPSREEMTKNQVSLTCLVKGFYPSDIAVEWES |
| | | NGQPENNYKTTPPMLDSDGSFFLYSKLTVDKSRWQQGNVFSCS |
| | | VMHEALHNHYTQKSLSLSPGK |
| 121 | IgG2.5-deltaHinge | ASTKGPSVFPLAPSSRSTSESTAALGCLVKDYFPEPVTVSWNS |
| | | GALTSGVHTFPAVLQSSGLYSLSSVVTVPSSNFGTQTYTCNVD |
| | | HKPSNTKVDKTVERKCPPCPAPPVAGPSVFLFPPKPKDTLMIS |
| | | RTPEVTCVVVDVSHEDPEVQFNWYVDGVEVHNAKTKPREEQFN |
| | | STFRVVSVLTVVHQDWLNGKEYKCKVSNKGLPAPIEKTISKTK |
| | | GQPREPQVYTLPPSREEMTKNQVSLTCLVKGFYPSDIAVEWES |
| | | NGQPENNYKTTPPMLDSDGSFFLYSKLTVDKSRWQQGNVFSCS |
| | | VMHEALHNHYTQKSLSLSPGK |
| 122 | IgG1-deltaG237 | ASTKGPSVFPLAPSSKSTSGGTAALGCLVKDYFPEPVTVSWNS |
| | | GALTSGVHTFPAVLQSSGLYSLSSVVTVPSSSLGTQTYICNVN |
| | | HKPSNTKVDKRVEPKSCDKTHTCPPCPAPELLGPSVFLFPPKP |
| | | KDTLMISRTPEVTCVVVDVSHEDPEVKFNWYVDGVEVHNAKTK |
| | | PREEQYNSTYRVVSVLTVLHQDWLNGKEYKCKVSNKALPAPIE |
| | | KTISKAKGQPREPQVYTLPPSREEMTKNQVSLTCLVKGFYPSD |
| | | IAVEWESNGQPENNYKTTPPVLDSDGSFFLYSKLTVDKSRWQQ |
| | | GNVFSCSVMHEALHNHYTQKSLSLSPG |
| 123 | IgG2-plusG237 | ASTKGPSVFPLAPCSRSTSESTAALGCLVKDYFPEPVTVSWNS |
| | | GALTSGVHTFPAVLQSSGLYSLSSVVTVPSSNFGTQTYTCNVD |
| | | HKPSNTKVDKTVERKSCVECPPCPAPPVAGGPSVFLFPPKPKD |
| | | TLMISRTPEVTCVVVDVSHEDPEVQFNWYVDGVEVHNAKTKPR |
| | | EEQFNSTFRVVSVLTVVHQDWLNGKEYKCKVSNKGLPAPIEKT |
| | | ISKTKGQPREPQVYTLPPSREEMTKNQVSLTCLVKGFYPSDIA |
| | | VEWESNGQPENNYKTTPPMLDSDGSFFLYSKLTVDKSRWQQGN |
| | | VFSCSVMHEALHNHYTQKSLSLSPGK |
| 124 | IgG2.4 | ASTKGPSVFPLAPCSRSTSESTAALGCLVKDYFPEPVTVSWNS |
| | | GALTSGVHTFPAVLQSSGLYSLSSVVTVPSSNFGTQTYTCNVD |
| | | HKPSNTKVDKTVERKCSVECPPCPAPPVAGPSVFLFPPKPKDT |
| | | LMISRTPEVTCVVVDVSHEDPEVQFNWYVDGVEVHNAKTKPRE |
| | | EQFNSTFRVVSVLTVVHQDWLNGKEYKCKVSNKGLPAPIEKTI |
| | | SKTKGQPREPQVYTLPPSREEMTKNQVSLTCLVKGFYPSDIAV |
| | | EWESNGQPENNYKTTPPMLDSDGSFFLYSKLTVDKSRWQQGNV |
| | | FSCSVMHEALHNHYTQKSLSLSPGK |
| 125 | IgG2.3/4 | ASTKGPSVFPLAPCSRSTSESTAALGCLVKDYFPEPVTVSWNS |
| | | GALTSGVHTFPAVLQSSGLYSLSSVVTVPSSNFGTQTYTCNVD |
| | | HKPSNTKVDKTVERKSSVECPPCPAPPVAGPSVFLFPPKPKDT |
| | | LMISRTPEVTCVVVDVSHEDPEVQFNWYVDGVEVHNAKTKPRE |
| | | EQFNSTFRVVSVLTVVHQDWLNGKEYKCKVSNKGLPAPIEKTI |
| | | SKTKGQPREPQVYTLPPSREEMTKNQVSLTCLVKGFYPSDIAV |
| | | EWESNGQPENNYKTTPPMLDSDGSFFLYSKLTVDKSRWQQGNV |
| | | FSCSVMHEALHNHYTQKSLSLSPGK |
| 126 | Hinge IgG2 C220S | ERKCSVECPPCPAPPVAG |
| 127 | IgG2/IgG1 hybrid hinge C220S | ERKCSVECPPCPAPELLGG |
| 128 | Wildtype IgG2 hinge portion | ERKCCVECPPCPAP |
| 131 | IgG2 hinge portion C219S | ERKSCVECPPCPAP |
| 132 | IgG2 hinge portion C220S | ERKCSVECPPCPAP |
| 129 | IgG2 hinge portion C219X | ERKXCVECPPCPAP |
| 130 | IgG2 hinge portion C220X | ERKCXVECPPCPAP |
| 133 | IgG2 CH1 + IgG2 hinge | ASTKGPSVFPLAPCSRSTSESTAALGCLVKDYFPEPVTVSWNS |
| | (wildtype) | GALTSGVHTFPAVLQSSGLYSLSSVVTVPSSNFGTQTYTCNVD |
| | | HKPSNTKVDKTVERKCCVECPPCPAPPVAG |
| 134 | IgG2 with C219X | ERKXCVECPPCPAPPVAG |
| 135 | IgG2 with C220X | ERKCXVECPPCPAPPVAG |
| 136 | IgG2/IgG1 hybrid with C219X | ERKXCVECPPCPAPELLGG |
| 137 | IgG2/IgG1 hybrid with C220X | ERKCVECPPCPAPELLGG |
| 138 | IgG2/IgG1 hybrid deltaG | ERKCCVECPPCPAPELLG |
| 139 | IgG2/IgG1 hybrid with C219S | ERKSCVECPPCPAPELLG |
| | deltaG | |
| 140 | IgG2/IgG1 hybrid with C220S | ERKCSVECPPCPAPELLG |
| | deltaG | |
| 141 | IgG2/IgG1 hybrid with C219X | ERKXCVECPPCPAPELLG |
| | deltaG | |
| 142 | IgG2/IgG1 hybrid with C220X | ERKCXVECPPCPAPELLG |
| | deltaG | |
| 143 | Wildtype IgG2 with C- | ERKCCVECPPCPAPPVAGX |
| | terminal X | |
| 144 | IgG2 with C219Swith C- | ERKSCVECPPCPAPPVAGX |
| | terminal X | |
| 145 | IgG2 with C220Swith C- | ERKCSVECPPCPAPPVAGX |
| | terminal X | |
| 146 | IgG2 with C219X with C- | ERKXCVECPPCPAPPVAGX |
| | terminal X | |
| 147 | IgG2 with C220X with C- | ERKCXVECPPCPAPPVAGX |
| | terminal X | |
| 148 | IgG2 hinge portion | PVAG |
| 149 | IgG1 hinge portion | SCDKTHT |
| 150 | IgG1 hinge portion 1 | ELLG |
| 151 | IgG1 hinge portion 2 | ELLGG |
| 152 | IgG2.3-V13 | ASTKGPSVFPLAPCSRSTSESTAALGCLVKDYFPEPVTVSWNS |
| | | GALTSGVHTFPAVLQSSGLYSLSSVVTVPSSNFGTQTYTCNVD |
| | | HKPSNTKVDKTVERKSCVECPPCPAPPVAGDSVFLFPPKPKDT |
| | | LMISRTPEVTCVVVDVSHEDPEVQFNWYVDGVEVHNAKTKPRE |
| | | EQFNSTFRVVSVLTVVHQDWLNGKEYKCKVSNKGLPAPIEKTI |
| | | SKTKGQPREPQVYTLPPSREEMTKNQVSLTCLVKGFYPSDIAV |
| | | EWESNGQPENNYKTTPPMLDSDGSFFLYSKLTVDKSRWQQGNV |
| | | FSCSVMHEALHNHYTQKSLSLSPGK |
| 153 | IgG2.3-V14 | ASTKGPSVFPLAPCSRSTSESTAALGCLVKDYFPEPVTVSWNS |
| | | GALTSGVHTFPAVLQSSGLYSLSSVVTVPSSNFGTQTYTCNVD |
| | | HKPSNTKVDKTVERKSCVECPPCPAPPVAGDSVFLFPPKPKDT |
| | | LMISRTPEVTCVVVDVSHEDGEVQFNWYVDGVEVHNAKTKPRE |
| | | EQFNSTFRVVSVLTVVHQDWLNGKEYKCKVSNKGLPAPIEKTI |
| | | SKTKGQPREPQVYTLPPSREEMTKNQVSLTCLVKGFYPSDIAV |
| | | EWESNGQPENNYKTTPPMLDSDGSFFLYSKLTVDKSRWQQGNV |
| | | FSCSVMHEALHNHYTQKSLSLSPGK |
| 154 | IgG2.3-V15 | ASTKGPSVFPLAPCSRSTSESTAALGCLVKDYFPEPVTVSWNS |
| | | GALTSGVHTFPAVLQSSGLYSLSSVVTVPSSNFGTQTYTCNVD |
| | | HKPSNTKVDKTVERKSCVECPPCPAPPVAGDSVFLFPPKPKDT |
| | | LMISRTPEVTCVVVDVSDEDGEVQFNWYVDGVEVHNAKTKPRE |
| | | EQFNSTFRVVSVLTVVHQDWLNGKEYKCKVSNKGLPAPIEKTI |
| | | SKTKGQPREPQVYTLPPSREEMTKNQVSLTCLVKGFYPSDIAV |
| | | EWESNGQPENNYKTTPPMLDSDGSFFLYSKLTVDKSRWQQGNV |
| | | FSCSVMHEALHNHYTQKSLSLSPGK |
| 155 | IgG2.3-V16 | ASTKGPSVFPLAPCSRSTSESTAALGCLVKDYFPEPVTVSWNS |
| | | GALTSGVHTFPAVLQSSGLYSLSSVVTVPSSNFGTQTYTCNVD |
| | | HKPSNTKVDKTVERKSCVECPPCPAPPVAGDSVFLFPPKPKDT |
| | | LMISRTPEVTCVVVDVSHEDGEVQFNWYVDGVEVHNAKTKPRE |
| | | EQFNSTFRVVSVLTVVHQDWLNGKEYKCKVSNKGLPRPIEKTI |
| | | SKTKGQPREPQVYTLPPSREEMTKNQVSLTCLVKGFYPSDIAV |
| | | EWESNGQPENNYKTTPPMLDSDGSFFLYSKLTVDKSRWQQGNV |
| | | FSCSVMHEALHNHYTQKSLSLSPGK |
| 156 | IgG2.3-V17 | ASTKGPSVFPLAPCSRSTSESTAALGCLVKDYFPEPVTVSWNS |
| | | GALTSGVHTFPAVLQSSGLYSLSSVVTVPSSNFGTQTYTCNVD |
| | | HKPSNTKVDKTVERKSCVECPPCPAPPVAGDSVFLFPPKPKDT |
| | | LMISRTPEVTCVVVDVSDEDGEVQFNWYVDGVEVHNAKTKPRE |
| | | EQFNSTFRVVSVLTVVHQDWLNGKEYKCKVSNKGLPRPIEKTI |
| | | SKTKGQPREPQVYTLPPSREEMTKNQVSLTCLVKGFYPSDIAV |
| | | EWESNGQPENNYKTTPPMLDSDGSFFLYSKLTVDKSRWQQGNV |
| | | FSCSVMHEALHNHYTQKSLSLSPGK |
| 157 | IgG2.3-V18 | ASTKGPSVFPLAPCSRSTSESTAALGCLVKDYFPEPVTVSWNS |
| | | GALTSGVHTFPAVLQSSGLYSLSSVVTVPSSNFGTQTYTCNVD |
| | | HKPSNTKVDKTVERKSCVECPPCPAPPVAGPSVFLFPPKPKDT |
| | | LMISRTPEVTCVVVDVEHEDPEVQFNWYVDGVEVHNAKTKPRE |
| | | EQFNSTFRVVSVLTVVHQDWLNGKEYKCKVSNKGLPAPIEKTI |
| | | SKTKGQPREPQVYTLPPSREEMTKNQVSLTCLVKGFYPSDIAV |
| | | EWESNGQPENNYKTTPPMLDSDGSFFLYSKLTVDKSRWQQGNV |
| | | FSCSVMHEALHNHYTQKSLSLSPGK |
| 158 | IgG2.3-V19 | ASTKGPSVFPLAPCSRSTSESTAALGCLVKDYFPEPVTVSWNS |
| | | GALTSGVHTFPAVLQSSGLYSLSSVVTVPSSNFGTQTYTCNVD |
| | | HKPSNTKVDKTVERKSCVECPPCPAPPVAGPSVFLFPPKPKDT |
| | | LMISRTPEVTCVVVDVEHEDPEVQFNWYVDGVEVHNAKTKPRE |
| | | EQFNSTFRVVSVLTVVHQDWLNGKEYKCKVSNKGFPAPIEKTI |
| | | SKTKGQPREPQVYTLPPSREEMTKNQVSLTCLVKGFYPSDIAV |
| | | EWESNGQPENNYKTTPPMLDSDGSFFLYSKLTVDKSRWQQGNV |
| | | FSCSVMHEALHNHYTQKSLSLSPGK |
| 159 | IgG2.3G1 | ASTKGPSVFPLAPCSRSTSESTAALGCLVKDYFPEPVTVSWNS |
| | | GALTSGVHTFPAVLQSSGLYSLSSVVTVPSSNFGTQTYTCNVD |
| | | HKPSNTKVDKTVERKSCVECPPCPAPELLGGPSVFLFPPKPKD |
| | | TLMISRTPEVTCVVVDVSHEDPEVKFNWYVDGVEVHNAKTKPR |
| | | EEQYNSTYRVVSVLTVLHQDWLNGKEYKCKVSNKALPAPIEKT |
| | | ISKAKGQPREPQVYTLPPSREEMTKNQVSLTCLVKGFYPSDIA |
| | | VEWESNGQPENNYKTTPPVLDSDGSFFLYSKLTVDKSRWQQGN |
| | | VFSCSVMHEALHNHYTQKSLSLSPGK |
| 160 | IgG2.3G1-V20 | ASTKGPSVFPLAPCSRSTSESTAALGCLVKDYFPEPVTVSWNS |
| | | GALTSGVHTFPAVLQSSGLYSLSSVVTVPSSNFGTQTYTCNVD |
| | | HKPSNTKVDKTVERKSCVECPPCPAPELLGGDSVFLFPPKPKD |
| | | TLMISRTPEVTCVVVDVSHEDPEVKFNWYVDGVEVHNAKTKPR |
| | | EEQYNSTYRVVSVLTVLHQDWLNGKEYKCKVSNKALPAPIEKT |
| | | ISKAKGQPREPQVYTLPPSREEMTKNQVSLTCLVKGFYPSDIA |
| | | VEWESNGQPENNYKTTPPVLDSDGSFFLYSKLTVDKSRWQQGN |
| | | VFSCSVMHEALHNHYTQKSLSLSPGK |
| 161 | IgG2.3G1-V21 | ASTKGPSVFPLAPCSRSTSESTAALGCLVKDYFPEPVTVSWNS |
| | | GALTSGVHTFPAVLQSSGLYSLSSVVTVPSSNFGTQTYTCNVD |
| | | HKPSNTKVDKTVERKSCVECPPCPAPELLGGDSVFLFPPKPKD |
| | | TLMISRTPEVTCVVVDVSHEDGEVKFNWYVDGVEVHNAKTKPR |
| | | EEQYNSTYRVVSVLTVLHQDWLNGKEYKCKVSNKALPAPIEKT |
| | | ISKAKGQPREPQVYTLPPSREEMTKNQVSLTCLVKGFYPSDIA |
| | | VEWESNGQPENNYKTTPPVLDSDGSFFLYSKLTVDKSRWQQGN |
| | | VFSCSVMHEALHNHYTQKSLSLSPGK |
| 162 | IgG2.3G1-V22 | ASTKGPSVFPLAPCSRSTSESTAALGCLVKDYFPEPVTVSWNS |
| | | GALTSGVHTFPAVLQSSGLYSLSSVVTVPSSNFGTQTYTCNVD |
| | | HKPSNTKVDKTVERKSCVECPPCPAPELLGGDSVFLFPPKPKD |
| | | TLMISRTPEVTCVVVDVSDEDGEVKFNWYVDGVEVHNAKTKPR |
| | | EEQYNSTYRVVSVLTVLHQDWLNGKEYKCKVSNKALPAPIEKT |
| | | ISKAKGQPREPQVYTLPPSREEMTKNQVSLTCLVKGFYPSDIA |
| | | VEWESNGQPENNYKTTPPVLDSDGSFFLYSKLTVDKSRWQQGN |
| | | VFSCSVMHEALHNHYTQKSLSLSPGK |
| 163 | IgG2.3G1-V23 | ASTKGPSVFPLAPCSRSTSESTAALGCLVKDYFPEPVTVSWNS |
| | | GALTSGVHTFPAVLQSSGLYSLSSVVTVPSSNFGTQTYTCNVD |
| | | HKPSNTKVDKTVERKSCVECPPCPAPELLGGDSVFLFPPKPKD |
| | | TLMISRTPEVTCVVVDVSHEDGEVKFNWYVDGVEVHNAKTKPR |
| | | EEQYNSTYRVVSVLTVLHQDWLNGKEYKCKVSNKALPRPIEKT |
| | | ISKAKGQPREPQVYTLPPSREEMTKNQVSLTCLVKGFYPSDIA |
| | | VEWESNGQPENNYKTTPPVLDSDGSFFLYSKLTVDKSRWQQGN |
| | | VFSCSVMHEALHNHYTQKSLSLSPGK |
| 164 | IgG2.3G1-V24 | ASTKGPSVFPLAPCSRSTSESTAALGCLVKDYFPEPVTVSWNS |
| | | GALTSGVHTFPAVLQSSGLYSLSSVVTVPSSNFGTQTYTCNVD |
| | | HKPSNTKVDKTVERKSCVECPPCPAPELLGGDSVFLFPPKPKD |
| | | TLMISRTPEVTCVVVDVSDEDGEVKFNWYVDGVEVHNAKTKPR |
| | | EEQYNSTYRVVSVLTVLHQDWLNGKEYKCKVSNKALPRPIEKT |
| | | ISKAKGQPREPQVYTLPPSREEMTKNQVSLTCLVKGFYPSDIA |
| | | VEWESNGQPENNYKTTPPVLDSDGSFFLYSKLTVDKSRWQQGN |
| | | VFSCSVMHEALHNHYTQKSLSLSPGK |
| 165 | IgG2.3G1-V25 | ASTKGPSVFPLAPCSRSTSESTAALGCLVKDYFPEPVTVSWNS |
| | | GALTSGVHTFPAVLQSSGLYSLSSVVTVPSSNFGTQTYTCNVD |
| | | HKPSNTKVDKTVERKSCVECPPCPAPELLGDDSVFLFPPKPKD |
| | | TLMISRTPEVTCVVVDVSDEDGEVKFNWYVDGVEVHNAKTKPR |
| | | EEQYNSTYRVVSVLTVLHQDWLNGKEYKCKVSNKALPRPIEKT |
| | | ISKAKGQPREPQVYTLPPSREEMTKNQVSLTCLVKGFYPSDIA |
| | | VEWESNGQPENNYKTTPPVLDSDGSFFLYSKLTVDKSRWQQGN |
| | | VFSCSVMHEALHNHYTQKSLSLSPGK |
| 166 | IgG2.3G1-V26 | ASTKGPSVFPLAPCSRSTSESTAALGCLVKDYFPEPVTVSWNS |
| | | GALTSGVHTFPAVLQSSGLYSLSSVVTVPSSNFGTQTYTCNVD |
| | | HKPSNTKVDKTVERKSCVECPPCPAPDLLGDDSVFLFPPKPKD |
| | | TLMISRTPEVTCVVVDVSDEDGEVKFNWYVDGVEVHNAKTKPR |
| | | EEQYNSTYRVVSVLTVLHQDWLNGKEYKCKVSNKALPRPIEKT |
| | | ISKAKGQPREPQVYTLPPSREEMTKNQVSLTCLVKGFYPSDIA |
| | | VEWESNGQPENNYKTTPPVLDSDGSFFLYSKLTVDKSRWQQGN |
| | | VFSCSVMHEALHNHYTQKSLSLSPGK |
| 167 | IgG2.3G1-V27 | ASTKGPSVFPLAPCSRSTSESTAALGCLVKDYFPEPVTVSWNS |
| | | GALTSGVHTFPAVLQSSGLYSLSSVVTVPSSNFGTQTYTCNVD |
| | | HKPSNTKVDKTVERKSCVECPPCPAPELLGGPSVFLFPPKPKD |
| | | TLMISRTPEVTCVVVDVEHEDPEVKFNWYVDGVEVHNAKTKPR |
| | | EEQYNSTYRVVSVLTVLHQDWLNGKEYKCKVSNKALPAPIEKT |
| | | ISKAKGQPREPQVYTLPPSREEMTKNQVSLTCLVKGFYPSDIA |
| | | VEWESNGQPENNYKTTPPVLDSDGSFFLYSKLTVDKSRWQQGN |
| | | VFSCSVMHEALHNHYTQKSLSLSPGK |
| 168 | IgG2.3G1-V28 | ASTKGPSVFPLAPCSRSTSESTAALGCLVKDYFPEPVTVSWNS |
| | | GALTSGVHTFPAVLQSSGLYSLSSVVTVPSSNFGTQTYTCNVD |
| | | HKPSNTKVDKTVERKSCVECPPCPAPELLGGPSVFLFPPKPKD |
| | | TLMISRTPEVTCVVVDVEHEDPEVKFNWYVDGVEVHNAKTKPR |
| | | EEQYNSTYRVVSVLTVLHQDWLNGKEYKCKVSNKAFPAPIEKT |
| | | ISKAKGQPREPQVYTLPPSREEMTKNQVSLTCLVKGFYPSDIA |
| | | VEWESNGQPENNYKTTPPVLDSDGSFFLYSKLTVDKSRWQQGN |
| | | VFSCSVMHEALHNHYTQKSLSLSPGK |
| 169 | IgG2.3G1-AY-V9-D270E | ASTKGPSVFPLAPCSRSTSESTAALGCLVKDYFPEPVTVSWNS |
| | | GALTSGVHTFPAVLQSSGLYSLSSVVTVPSSNFGTQTYTCNVD |
| | | HKPSNTKVDKTVERKSCVECPPCPAPELLGDDSVFLFPPKPKD |
| | | TLMISRTPEVTCVVVDVSHEEGEVKFNWYVDGVEVHNAKTKPR |
| | | EEQYNSTYRVVSVLTVLHQDWLNGKEYKCKVSNKALPRPIEKT |
| | | ISKAKGQPREPQVYTLPPSREEMTKNQVSLTCLVKGFYPSDIA |
| | | VEWESNGQPENNYKTTPPVLDSDGSFFLYSKLTVDKSRWQQGN |
| | | VFSCSVMHEALHNHYTQKSLSLSPGK |
| 170 | IgG2.3G1-AY-V11 | ASTKGPSVFPLAPCSRSTSESTAALGCLVKDYFPEPVTVSWNS |
| | | GALTSGVHTFPAVLQSSGLYSLSSVVTVPSSNFGTQTYTCNVD |
| | | HKPSNTKVDKTVERKSCVECPPCPAPELLGDDSVFLFPPKPKD |
| | | TLMISRTPEVTCVVVDVSDEDGEVKFNWYVDGVEVHNAKTKPR |
| | | EEQYNSTYRVVSVLTVLHQDWLNGKEYKCKVSNKALPRPIEKT |
| | | ISKAKGQPREPQVYTLPPSREEMTKNQVSLTCLVKGFYPSDIA |
| | | VEWESNGQPENNYKTTPPVLDSDGSFFLYSKLTVDKSRWQQGN |
| | | VFSCSVMHEALHNHYTQKSLSLSPGK |
| 171 | IgG2.5 G1-AY-V9-D270E | ASTKGPSVFPLAPSSRSTSESTAALGCLVKDYFPEPVTVSWNS |
| | | GALTSGVHTFPAVLQSSGLYSLSSVVTVPSSNFGTQTYTCNVD |
| | | HKPSNTKVDKTVERKCCVECPPCPAPELLGDDSVFLFPPKPKD |
| | | TLMISRTPEVTCVVVDVSHEEGEVKFNWYVDGVEVHNAKTKPR |
| | | EEQYNSTYRVVSVLTVLHQDWLNGKEYKCKVSNKALPRPIEKT |
| | | ISKAKGQPREPQVYTLPPSREEMTKNQVSLTCLVKGFYPSDIA |
| | | VEWESNGQPENNYKTTPPVLDSDGSFFLYSKLTVDKSRWQQGN |
| | | VFSCSVMHEALHNHYTQKSLSLSPGK |
| 172 | IgG2.5G1-AY-V11 | ASTKGPSVFPLAPSSRSTSESTAALGCLVKDYFPEPVTVSWNS |
| | | GALTSGVHTFPAVLQSSGLYSLSSVVTVPSSNFGTQTYTCNVD |
| | | HKPSNTKVDKTVERKCCVECPPCPAPELLGDDSVFLFPPKPKD |
| | | TLMISRTPEVTCVVVDVSDEDGEVKFNWYVDGVEVHNAKTKPR |
| | | EEQYNSTYRVVSVLTVLHQDWLNGKEYKCKVSNKALPRPIEKT |
| | | ISKAKGQPREPQVYTLPPSREEMTKNQVSLTCLVKGFYPSDIA |
| | | VEWESNGQPENNYKTTPPVLDSDGSFFLYSKLTVDKSRWQQGN |
| | | VFSCSVMHEALHNHYTQKSLSLSPGK |
| 173 | IgGlf-GASDALIE | ASTKGPSVFPLAPSSKSTSGGTAALGCLVKDYFPEPVTVSWNS |
| | | GALTSGVHTFPAVLQSSGLYSLSSVVTVPSSSLGTQTYICNVN |
| | | HKPSNTKVDKRVEPKSCDKTHTCPPCPAPELLAGPDVFLFPPK |
| | | PKDTLMISRTPEVTCVVVDVSHEDPEVKFNWYVDGVEVHNAKT |
| | | KPREEQYNSTYRVVSVLTVLHQDWLNGKEYKCKVSNKALPLPE |
| | | EKTISKAKGQPREPQVYTLPPSREEMTKNQVSLTCLVKGFYPS |
| | | DIAVEWESNGQPENNYKTTPPVLDSDGSFFLYSKLTVDKSRWQ |
| | | QGNVFSCSVMHEALHNHYTQKSLSLSPGK |
| 174 | IgG1f-G236A | ASTKGPSVFPLAPSSKSTSGGTAALGCLVKDYFPEPVTVSWNS |
| | | GALTSGVHTFPAVLQSSGLYSLSSVVTVPSSSLGTQTYICNVN |
| | | HKPSNTKVDKRVEPKSCDKTHTCPPCPAPELLAGPSVFLFPPK |
| | | PKDTLMISRTPEVTCVVVDVSHEDPEVKFNWYVDGVEVHNAKT |
| | | KPREEQYNSTYRVVSVLTVLHQDWLNGKEYKCKVSNKALPAPI |
| | | EKTISKAKGQPREPQVYTLPPSREEMTKNQVSLTCLVKGFYPS |
| | | DIAVEWESNGQPENNYKTTPPVLDSDGSFFLYSKLTVDKSRWQ |
| | | QGNVFSCSVMHEALHNHYTQKSLSLSPGK |
| 175 | IgG2.3G1-AY-G236A | ASTKGPSVFPLAPCSRSTSESTAALGCLVKDYFPEPVTVSWNS |
| | | GALTSGVHTFPAVLQSSGLYSLSSVVTVPSSNFGTQTYTCNVD |
| | | HKPSNTKVDKTVERKSCVECPPCPAPELLAGPSVFLFPPKPKD |
| | | TLMISRTPEVTCVVVDVSHEDPEVKFNWYVDGVEVHNAKTKPR |
| | | EEQYNSTYRVVSVLTVLHQDWLNGKEYKCKVSNKALPAPIEKT |
| | | ISKAKGQPREPQVYTLPPSREEMTKNQVSLTCLVKGFYPSDIA |
| | | VEWESNGQPENNYKTTPPVLDSDGSFFLYSKLTVDKSRWQQGN |
| | | VFSCSVMHEALHNHYTQKSLSLSPGK |
| 176 | IgG2.3G1-AY-GASDALIE | ASTKGPSVFPLAPCSRSTSESTAALGCLVKDYFPEPVTVSWNS |
| | | GALTSGVHTFPAVLQSSGLYSLSSVVTVPSSNFGTQTYTCNVD |
| | | HKPSNTKVDKTVERKSCVECPPCPAPELLAGPDVFLFPPKPKD |
| | | TLMISRTPEVTCVVVDVSHEDPEVKFNWYVDGVEVHNAKTKPR |
| | | EEQYNSTYRVVSVLTVLHQDWLNGKEYKCKVSNKALPLPEEKT |
| | | ISKAKGQPREPQVYTLPPSREEMTKNQVSLTCLVKGFYPSDIA |
| | | VEWESNGQPENNYKTTPPVLDSDGSFFLYSKLTVDKSRWQQGN |
| | | VFSCSVMHEALHNHYTQKSLSLSPGK |
| 177 | IgG2.5G1-AY-G236A | ASTKGPSVFPLAPSSRSTSESTAALGCLVKDYFPEPVTVSWNS |
| | | GALTSGVHTFPAVLQSSGLYSLSSVVTVPSSNFGTQTYTCNVD |
| | | HKPSNTKVDKTVERKCCVECPPCPAPELLAGPSVFLFPPKPKD |
| | | TLMISRTPEVTCVVVDVSHEDPEVKFNWYVDGVEVHNAKTKPR |
| | | EEQYNSTYRVVSVLTVLHQDWLNGKEYKCKVSNKALPAPIEKT |
| | | ISKAKGQPREPQVYTLPPSREEMTKNQVSLTCLVKGFYPSDIA |
| | | VEWESNGQPENNYKTTPPVLDSDGSFFLYSKLTVDKSRWQQGN |
| | | VFSCSVMHEALHNHYTQKSLSLSPGK |
| 178 | IgG2.5G1-AY-GASDALIE | STKGPSVFPLAPSSRSTSESTAALGCLVKDYFPEPVTVSWNSG |
| | | ALTSGVHTFPAVLQSSGLYSLSSVVTVPSSNFGTQTYTCNVDH |
| | | KPSNTKVDKTVERKCCVECPPCPAPELLAGPDVFLFPPKPKDT |
| | | LMISRTPEVTCVVVDVSHEDPEVKFNWYVDGVEVHNAKTKPRE |
| | | EQYNSTYRVVSVLTVLHQDWLNGKEYKCKVSNKALPLPEEKTI |
| | | SKAKGQPREPQVYTLPPSREEMTKNQVSLTCLVKGFYPSDIAV |
| | | EWESNGQPENNYKTTPPVLDSDGSFFLYSKLTVDKSRWQQGNV |
| | | FSCSVMHEALHNHYTQKSLSLSPGK |
| 179 | IgG2.3G1.1f-AY | ASTKGPSVFPLAPCSRSTSESTAALGCLVKDYFPEPVTVSWNS |
| | | GALTSGVHTFPAVLQSSGLYSLSSVVTVPSSNFGTQTYTCNVD |
| | | HKPSNTKVDKTVERKSCVECPPCPAPEAEGAPSVFLFPPKPKD |
| | | TLMISRTPEVTCVVVDVSHEDPEVKFNWYVDGVEVHNAKTKPR |
| | | EEQYNSTYRVVSVLTVLHQDWLNGKEYKCKVSNKALPSSIEKT |
| | | ISKAKGQPREPQVYTLPPSREEMTKNQVSLTCLVKGFYPSDIA |
| | | VEWESNGQPENNYKTTPPVLDSDGSFFLYSKLTVDKSRWQQGN |
| | | VFSCSVMHEALHNHYTQKSLSLSPGK |
| 180 | IgG2.3G1.3f-AY | ASTKGPSVFPLAPCSRSTSESTAALGCLVKDYFPEPVTVSWNS |
| | | GALTSGVHTFPAVLQSSGLYSLSSVVTVPSSNFGTQTYTCNVD |
| | | HKPSNTKVDKTVERKSCVECPPCPAPEAEGAPSVFLFPPKPKD |
| | | TLMISRTPEVTCVVVDVSHEDPEVKFNWYVDGVEVHNAKTKPR |
| | | EEQYNSTYRVVSVLTVLHQDWLNGKEYKCKVSNKALPAPIEKT |
| | | ISKAKGQPREPQVYTLPPSREEMTKNQVSLTCLVKGFYPSDIA |
| | | VEWESNGQPENNYKTTPPVLDSDGSFFLYSKLTVDKSRWQQGN |
| | | VFSCSVMHEALHNHYTQKSLSLSPGK |
| 181 | IgG2.3G1-AY-D265A | ASTKGPSVFPLAPCSRSTSESTAALGCLVKDYFPEPVTVSWNS |
| | | GALTSGVHTFPAVLQSSGLYSLSSVVTVPSSNFGTQTYTCNVD |
| | | HKPSNTKVDKTVERKSCVECPPCPAPELLGGPSVFLFPPKPKD |
| | | TLMISRTPEVTCVVVAVSHEDPEVKFNWYVDGVEVHNAKTKPR |
| | | EEQYNSTYRVVSVLTVLHQDWLNGKEYKCKVSNKALPAPIEKT |
| | | ISKAKGQPREPQVYTLPPSREEMTKNQVSLTCLVKGFYPSDIA |
| | | VEWESNGQPENNYKTTPPVLDSDGSFFLYSKLTVDKSRWQQGN |
| | | VFSCSVMHEALHNHYTQKSLSLSPGK |
| 182 | IgG2.3G1-AY-N297A | ASTKGPSVFPLAPCSRSTSESTAALGCLVKDYFPEPVTVSWNS |
| | | GALTSGVHTFPAVLQSSGLYSLSSVVTVPSSNFGTQTYTCNVD |
| | | HKPSNTKVDKTVERKSCVECPPCPAPELLGGPSVFLFPPKPKD |
| | | TLMISRTPEVTCVVVDVSHEDPEVKFNWYVDGVEVHNAKTKPR |
| | | EEQYASTYRVVSVLTVLHQDWLNGKEYKCKVSNKALPAPIEKT |
| | | ISKAKGQPREPQVYTLPPSREEMTKNQVSLTCLVKGFYPSDIA |
| | | VEWESNGQPENNYKTTPPVLDSDGSFFLYSKLTVDKSRWQQGN |
| | | VFSCSVMHEALHNHYTQKSLSLSPGK |
| 183 | IgG2.5G1.1f-AY | ASTKGPSVFPLAPSSRSTSESTAALGCLVKDYFPEPVTVSWNS |
| | | GALTSGVHTFPAVLQSSGLYSLSSVVTVPSSNFGTQTYTCNVD |
| | | HKPSNTKVDKTVERKCCVECPPCPAPEAEGAPSVFLFPPKPKD |
| | | TLMISRTPEVTCVVVDVSHEDPEVKFNWYVDGVEVHNAKTKPR |
| | | EEQYNSTYRVVSVLTVLHQDWLNGKEYKCKVSNKALPSSIEKT |
| | | ISKAKGQPREPQVYTLPPSREEMTKNQVSLTCLVKGFYPSDIA |
| | | VEWESNGQPENNYKTTPPVLDSDGSFFLYSKLTVDKSRWQQGN |
| | | VFSCSVMHEALHNHYTQKSLSLSPGK |
| 184 | IgG2.5G1.3f-AY | ASTKGPSVFPLAPSSRSTSESTAALGCLVKDYFPEPVTVSWNS |
| | | GALTSGVHTFPAVLQSSGLYSLSSVVTVPSSNFGTQTYTCNVD |
| | | HKPSNTKVDKTVERKCCVECPPCPAPEAEGAPSVFLFPPKPKD |
| | | TLMISRTPEVTCVVVDVSHEDPEVKFNWYVDGVEVHNAKTKPR |
| | | EEQYNSTYRVVSVLTVLHQDWLNGKEYKCKVSNKALPAPIEKT |
| | | ISKAKGQPREPQVYTLPPSREEMTKNQVSLTCLVKGFYPSDIA |
| | | VEWESNGQPENNYKTTPPVLDSDGSFFLYSKLTVDKSRWQQGN |
| | | VFSCSVMHEALHNHYTQKSLSLSPGK |
| 185 | IgG2.5G1-AY-D265A | ASTKGPSVFPLAPSSRSTSESTAALGCLVKDYFPEPVTVSWNS |
| | | GALTSGVHTFPAVLQSSGLYSLSSVVTVPSSNFGTQTYTCNVD |
| | | HKPSNTKVDKTVERKCCVECPPCPAPELLGGPSVFLFPPKPKD |
| | | TLMISRTPEVTCVVVAVSHEDPEVKFNWYVDGVEVHNAKTKPR |
| | | EEQYNSTYRVVSVLTVLHQDWLNGKEYKCKVSNKALPAPIEKT |
| | | ISKAKGQPREPQVYTLPPSREEMTKNQVSLTCLVKGFYPSDIA |
| | | VEWESNGQPENNYKTTPPVLDSDGSFFLYSKLTVDKSRWQQGN |
| | | VFSCSVMHEALHNHYTQKSLSLSPGK |
| 186 | IgG2.5G1-AY-N297A | ASTKGPSVFPLAPSSRSTSESTAALGCLVKDYFPEPVTVSWNS |
| | | GALTSGVHTFPAVLQSSGLYSLSSVVTVPSSNFGTQTYTCNVD |
| | | HKPSNTKVDKTVERKCCVECPPCPAPELLGGPSVFLFPPKPKD |
| | | TLMISRTPEVTCVVVDVSHEDPEVKFNWYVDGVEVHNAKTKPR |
| | | EEQYASTYRVVSVLTVLHQDWLNGKEYKCKVSNKALPAPIEKT |
| | | ISKAKGQPREPQVYTLPPSREEMTKNQVSLTCLVKGFYPSDIA |
| | | VEWESNGQPENNYKTTPPVLDSDGSFFLYSKLTVDKSRWQQGN |
| | | VFSCSVMHEALHNHYTQKSLSLSPGK |
| 187 | CT | ASTKGPSVFPLAPSSKSTSGGTAALGCLVKDYFPEPVTVSWNS |
| | | GALTSGVHTFPAVLQSSGLYSLSSVVTVPSSSLGTQTYICNVN |
| | | HKPSNTKVDKRVEPKSCDKTHTSPPSPAPELLGGSSVFLFPPK |
| | | PKDTLMISRTPEVTCVVVDVSHEDPEVKFNWYVDGVEVHNAKT |
| | | KPREEQYNSTYRVVSVLTVLHQDWLNGKEYKCKVSNKALPAPI |
| | | EKTISKAKGQPREPQVYTLPPSRDELTKNQVSLTCLVKGFYPS |
| | | DIAVEWESNGQPENNYKTTPPVLDSDGSFFLYSKLTVDKSRWQ |
| | | QGNVFSCSVMHEALHNHYTQKSLSLSPGK |
| 188 | CTf | ASTKGPSVFPLAPSSKSTSGGTAALGCLVKDYFPEPVTVSWNS |
| | | GALTSGVHTFPAVLQSSGLYSLSSVVTVPSSSLGTQTYICNVN |
| | | HKPSNTKVDKRVEPKSCDKTHTSPPSPAPELLGGSSVFLFPPK |
| | | PKDTLMISRTPEVTCVVVDVSHEDPEVKFNWYVDGVEVHNAKT |
| | | KPREEQYNSTYRVVSVLTVLHQDWLNGKEYKCKVSNKALPAPI |
| | | EKTISKAKGQPREPQVYTLPPSREEMTKNQVSLTCLVKGFYPS |
| | | DIAVEWESNGQPENNYKTTPPVLDSDGSFFLYSKLTVDKSRWQ |
| | | QGNVFSCSVMHEALHNHYTQKSLSLSPGK |
| 189 | IgG2.3-CT | ASTKGPSVFPLAPCSRSTSESTAALGCLVKDYFPEPVTVSWNS |
| | | GALTSGVHTFPAVLQSSGLYSLSSVVTVPSSNFGTQTYTCNVD |
| | | HKPSNTKVDKTVERKSCVESPPSPAPELLGGSSVFLFPPKPKD |
| | | TLMISRTPEVTCVVVDVSHEDPEVKFNWYVDGVEVHNAKTKPR |
| | | EEQYNSTYRVVSVLTVLHQDWLNGKEYKCKVSNKALPAPIEKT |
| | | ISKAKGQPREPQVYTLPPSRDELTKNQVSLTCLVKGFYPSDIA |
| | | VEWESNGQPENNYKTTPPVLDSDGSFFLYSKLTVDKSRWQQGN |
| | | VFSCSVMHEALHNHYTQKSLSLSPGK |
| 190 | IgG2.5-CT | ASTKGPSVFPLAPSSRSTSESTAALGCLVKDYFPEPVTVSWNS |
| | | GALTSGVHTFPAVLQSSGLYSLSSVVTVPSSNFGTQTYTCNVD |
| | | HKPSNTKVDKTVERKCCVESPPSPAPELLGGSSVFLFPPKPKD |
| | | TLMISRTPEVTCVVVDVSHEDPEVKFNWYVDGVEVHNAKTKPR |
| | | EEQYNSTYRVVSVLTVLHQDWLNGKEYKCKVSNKALPAPIEKT |
| | | ISKAKGQPREPQVYTLPPSRDELTKNQVSLTCLVKGFYPSDIA |
| | | VEWESNGQPENNYKTTPPVLDSDGSFFLYSKLTVDKSRWQQGN |
| | | VFSCSVMHEALHNHYTQKSLSLSPGK |
| 191 | IgG1fa-C226S | ASTKGPSVFPLAPSSKSTSGGTAALGCLVKDYFPEPVTVSWNS |
| | | GALTSGVHTFPAVLQSSGLYSLSSVVTVPSSSLGTQTYICNVN |
| | | HKPSNTKVDKRVEPKSCDKTHTSPPCPAPELLGGPSVFLFPPK |
| | | PKDTLMISRTPEVTCVVVDVSHEDPEVKFNWYVDGVEVHNAKT |
| | | KPREEQYNSTYRVVSVLTVLHQDWLNGKEYKCKVSNKALPAPI |
| | | EKTISKAKGQPREPQVYTLPPSRDELTKNQVSLTCLVKGFYPS |
| | | DIAVEWESNGQPENNYKTTPPVLDSDGSFFLYSKLTVDKSRWQ |
| | | QGNVFSCSVMHEALHNHYTQKSLSLSPGK |
| 192 | IgG1fa-C229S | ASTKGPSVFPLAPSSKSTSGGTAALGCLVKDYFPEPVTVSWNS |
| | | GALTSGVHTFPAVLQSSGLYSLSSVVTVPSSSLGTQTYICNVN |
| | | HKPSNTKVDKRVEPKSCDKTHTCPPSPAPELLGGPSVFLFPPK |
| | | PKDTLMISRTPEVTCVVVDVSHEDPEVKFNWYVDGVEVHNAKT |
| | | KPREEQYNSTYRVVSVLTVLHQDWLNGKEYKCKVSNKALPAPI |
| | | EKTISKAKGQPREPQVYTLPPSRDELTKNQVSLTCLVKGFYPS |
| | | DIAVEWESNGQPENNYKTTPPVLDSDGSFFLYSKLTVDKSRWQ |
| | | QGNVFSCSVMHEALHNHYTQKSLSLSPGK |
| 193 | IgG1fa-C226S, C229S | ASTKGPSVFPLAPSSKSTSGGTAALGCLVKDYFPEPVTVSWNS |
| | | GALTSGVHTFPAVLQSSGLYSLSSVVTVPSSSLGTQTYICNVN |
| | | HKPSNTKVDKRVEPKSCDKTHTSPPSPAPELLGGPSVFLFPPK |
| | | PKDTLMISRTPEVTCVVVDVSHEDPEVKFNWYVDGVEVHNAKT |
| | | KPREEQYNSTYRVVSVLTVLHQDWLNGKEYKCKVSNKALPAPI |
| | | EKTISKAKGQPREPQVYTLPPSRDELTKNQVSLTCLVKGFYPS |
| | | DIAVEWESNGQPENNYKTTPPVLDSDGSFFLYSKLTVDKSRWQ |
| | | QGNVFSCSVMHEALHNHYTQKSLSLSPGK |
| 194 | IgG1fa-P238S | ASTKGPSVFPLAPSSKSTSGGTAALGCLVKDYFPEPVTVSWNS |
| | | GALTSGVHTFPAVLQSSGLYSLSSVVTVPSSSLGTQTYICNVN |
| | | HKPSNTKVDKRVEPKSCDKTHTCPPCPAPELLGGSSVFLFPPK |
| | | PKDTLMISRTPEVTCVVVDVSHEDPEVKFNWYVDGVEVHNAKT |
| | | KPREEQYNSTYRVVSVLTVLHQDWLNGKEYKCKVSNKALPAPI |
| | | EKTISKAKGQPREPQVYTLPPSRDELTKNQVSLTCLVKGFYPS |
| | | DIAVEWESNGQPENNYKTTPPVLDSDGSFFLYSKLTVDKSRWQ |
| | | QGNVFSCSVMHEALHNHYTQKSLSLSPGK |
| 195 | IgG1fa-C226A | ASTKGPSVFPLAPSSKSTSGGTAALGCLVKDYFPEPVTVSWNS |
| | | GALTSGVHTFPAVLQSSGLYSLSSVVTVPSSSLGTQTYICNVN |
| | | HKPSNTKVDKRVEPKSCDKTHTAPPCPAPELLGGPSVFLFPPK |
| | | PKDTLMISRTPEVTCVVVDVSHEDPEVKFNWYVDGVEVHNAKT |
| | | KPREEQYNSTYRVVSVLTVLHQDWLNGKEYKCKVSNKALPAPI |
| | | EKTISKAKGQPREPQVYTLPPSRDELTKNQVSLTCLVKGFYPS |
| | | DIAVEWESNGQPENNYKTTPPVLDSDGSFFLYSKLTVDKSRWQ |
| | | QGNVFSCSVMHEALHNHYTQKSLSLSPGK |
| 196 | IgG1fa-C229A | ASTKGPSVFPLAPSSKSTSGGTAALGCLVKDYFPEPVTVSWNS |
| | | GALTSGVHTFPAVLQSSGLYSLSSVVTVPSSSLGTQTYICNVN |
| | | HKPSNTKVDKRVEPKSCDKTHTCPPAPAPELLGGPSVFLFPPK |
| | | PKDTLMISRTPEVTCVVVDVSHEDPEVKFNWYVDGVEVHNAKT |
| | | KPREEQYNSTYRVVSVLTVLHQDWLNGKEYKCKVSNKALPAPI |
| | | EKTISKAKGQPREPQVYTLPPSRDELTKNQVSLTCLVKGFYPS |
| | | DIAVEWESNGQPENNYKTTPPVLDSDGSFFLYSKLTVDKSRWQ |
| | | QGNVFSCSVMHEALHNHYTQKSLSLSPGK |
| 197 | IgG1fa-C226A, C229A | ASTKGPSVFPLAPSSKSTSGGTAALGCLVKDYFPEPVTVSWNS |
| | | GALTSGVHTFPAVLQSSGLYSLSSVVTVPSSSLGTQTYICNVN |
| | | HKPSNTKVDKRVEPKSCDKTHTAPPAPAPELLGGPSVFLFPPK |
| | | PKDTLMISRTPEVTCVVVDVSHEDPEVKFNWYVDGVEVHNAKT |
| | | KPREEQYNSTYRVVSVLTVLHQDWLNGKEYKCKVSNKALPAPI |
| | | EKTISKAKGQPREPQVYTLPPSRDELTKNQVSLTCLVKGFYPS |
| | | DIAVEWESNGQPENNYKTTPPVLDSDGSFFLYSKLTVDKSRWQ |
| | | QGNVFSCSVMHEALHNHYTQKSLSLSPGK |
| 198 | IgG1fa-P238K | ASTKGPSVFPLAPSSKSTSGGTAALGCLVKDYFPEPVTVSWNS |
| | | GALTSGVHTFPAVLQSSGLYSLSSVVTVPSSSLGTQTYICNVN |
| | | HKPSNTKVDKRVEPKSCDKTHTCPPCPAPELLGGKSVFLFPPK |
| | | PKDTLMISRTPEVTCVVVDVSHEDPEVKFNWYVDGVEVHNAKT |
| | | KPREEQYNSTYRVVSVLTVLHQDWLNGKEYKCKVSNKALPAPI |
| | | EKTISKAKGQPREPQVYTLPPSRDELTKNQVSLTCLVKGFYPS |
| | | DIAVEWESNGQPENNYKTTPPVLDSDGSFFLYSKLTVDKSRWQ |
| | | QGNVFSCSVMHEALHNHYTQKSLSLSPGK |
| 199 | IgG2.3-R133K | ASTKGPSVFPLAPCSKSTSESTAALGCLVKDYFPEPVTVSWNS |
| | | GALTSGVHTFPAVLQSSGLYSLSSVVTVPSSNFGTQTYTCNVD |
| | | HKPSNTKVDKTVERKSCVECPPCPAPPVAGPSVFLFPPKPKDT |
| | | LMISRTPEVTCVVVDVSHEDPEVQFNWYVDGVEVHNAKTKPRE |
| | | EQFNSTFRVVSVLTVVHQDWLNGKEYKCKVSNKGLPAPIEKTI |
| | | SKTKGQPREPQVYTLPPSREEMTKNQVSLTCLVKGFYPSDIAV |
| | | EWESNGQPENNYKTTPPMLDSDGSFFLYSKLTVDKSRWQQGNV |
| | | FSCSVMHEALHNHYTQKSLSLSPGK |
| 200 | IgG2.3-E137G | ASTKGPSVFPLAPCSRSTSGSTAALGCLVKDYFPEPVTVSWNS |
| | | GALTSGVHTFPAVLQSSGLYSLSSVVTVPSSNFGTQTYTCNVD |
| | | HKPSNTKVDKTVERKSCVECPPCPAPPVAGPSVFLFPPKPKDT |
| | | LMISRTPEVTCVVVDVSHEDPEVQFNWYVDGVEVHNAKTKPRE |
| | | EQFNSTFRVVSVLTVVHQDWLNGKEYKCKVSNKGLPAPIEKTI |
| | | SKTKGQPREPQVYTLPPSREEMTKNQVSLTCLVKGFYPSDIAV |
| | | EWESNGQPENNYKTTPPMLDSDGSFFLYSKLTVDKSRWQQGNV |
| | | FSCSVMHEALHNHYTQKSLSLSPGK |
| 201 | IgG2.3-S138G | ASTKGPSVFPLAPCSRSTSEGTAALGCLVKDYFPEPVTVSWNS |
| | | GALTSGVHTFPAVLQSSGLYSLSSVVTVPSSNFGTQTYTCNVD |
| | | HKPSNTKVDKTVERKSCVECPPCPAPPVAGPSVFLFPPKPKDT |
| | | LMISRTPEVTCVVVDVSHEDPEVQFNWYVDGVEVHNAKTKPRE |
| | | EQFNSTFRVVSVLTVVHQDWLNGKEYKCKVSNKGLPAPIEKTI |
| | | SKTKGQPREPQVYTLPPSREEMTKNQVSLTCLVKGFYPSDIAV |
| | | EWESNGQPENNYKTTPPMLDSDGSFFLYSKLTVDKSRWQQGNV |
| | | FSCSVMHEALHNHYTQKSLSLSPGK |
| 202 | IgG2.3-E137G-S138G | ASTKGPSVFPLAPCSRSTSGGTAALGCLVKDYFPEPVTVSWNS |
| | | GALTSGVHTFPAVLQSSGLYSLSSVVTVPSSNFGTQTYTCNVD |
| | | HKPSNTKVDKTVERKSCVECPPCPAPPVAGPSVFLFPPKPKDT |
| | | LMISRTPEVTCVVVDVSHEDPEVQFNWYVDGVEVHNAKTKPRE |
| | | EQFNSTFRVVSVLTVVHQDWLNGKEYKCKVSNKGLPAPIEKTI |
| | | SKTKGQPREPQVYTLPPSREEMTKNQVSLTCLVKGFYPSDIAV |
| | | EWESNGQPENNYKTTPPMLDSDGSFFLYSKLTVDKSRWQQGNV |
| | | FSCSVMHEALHNHYTQKSLSLSPGK |
| 203 | IgG2.3-T214R | ASTKGPSVFPLAPCSRSTSESTAALGCLVKDYFPEPVTVSWNS |
| | | GALTSGVHTFPAVLQSSGLYSLSSVVTVPSSNFGTQTYTCNVD |
| | | HKPSNTKVDKRVERKSCVECPPCPAPPVAGPSVFLFPPKPKDT |
| | | LMISRTPEVTCVVVDVSHEDPEVQFNWYVDGVEVHNAKTKPRE |
| | | EQFNSTFRVVSVLTVVHQDWLNGKEYKCKVSNKGLPAPIEKTI |
| | | SKTKGQPREPQVYTLPPSREEMTKNQVSLTCLVKGFYPSDIAV |
| | | EWESNGQPENNYKTTPPMLDSDGSFFLYSKLTVDKSRWQQGNV |
| | | FSCSVMHEALHNHYTQKSLSLSPGK |
| 204 | IgG2.3-R217P | ASTKGPSVFPLAPCSRSTSESTAALGCLVKDYFPEPVTVSWNS |
| | | GALTSGVHTFPAVLQSSGLYSLSSVVTVPSSNFGTQTYTCNVD |
| | | HKPSNTKVDKTVEPKSCVECPPCPAPPVAGPSVFLFPPKPKDT |
| | | LMISRTPEVTCVVVDVSHEDPEVQFNWYVDGVEVHNAKTKPRE |
| | | EQFNSTFRVVSVLTVVHQDWLNGKEYKCKVSNKGLPAPIEKTI |
| | | SKTKGQPREPQVYTLPPSREEMTKNQVSLTCLVKGFYPSDIAV |
| | | EWESNGQPENNYKTTPPMLDSDGSFFLYSKLTVDKSRWQQGNV |
| | | FSCSVMHEALHNHYTQKSLSLSPGK |
| 205 | IgG2.3-R217S | ASTKGPSVFPLAPCSRSTSESTAALGCLVKDYFPEPVTVSWNS |
| | | GALTSGVHTFPAVLQSSGLYSLSSVVTVPSSNFGTQTYTCNVD |
| | | HKPSNTKVDKTVESKSCVECPPCPAPPVAGPSVFLFPPKPKDT |
| | | LMISRTPEVTCVVVDVSHEDPEVQFNWYVDGVEVHNAKTKPRE |
| | | EQFNSTFRVVSVLTVVHQDWLNGKEYKCKVSNKGLPAPIEKTI |
| | | SKTKGQPREPQVYTLPPSREEMTKNQVSLTCLVKGFYPSDIAV |
| | | EWESNGQPENNYKTTPPMLDSDGSFFLYSKLTVDKSRWQQGNV |
| | | FSCSVMHEALHNHYTQKSLSLSPGK |
| 206 | IgG2.3-V224A | ASTKGPSVFPLAPCSRSTSESTAALGCLVKDYFPEPVTVSWNS |
| | | GALTSGVHTFPAVLQSSGLYSLSSVVTVPSSNFGTQTYTCNVD |
| | | HKPSNTKVDKTVERKSCAECPPCPAPPVAGPSVFLFPPKPKDT |
| | | LMISRTPEVTCVVVDVSHEDPEVQFNWYVDGVEVHNAKTKPRE |
| | | EQFNSTFRVVSVLTVVHQDWLNGKEYKCKVSNKGLPAPIEKTI |
| | | SKTKGQPREPQVYTLPPSREEMTKNQVSLTCLVKGFYPSDIAV |
| | | EWESNGQPENNYKTTPPMLDSDGSFFLYSKLTVDKSRWQQGNV |
| | | FSCSVMHEALHNHYTQKSLSLSPGK |
| 207 | IgG2.3-E225A | ASTKGPSVFPLAPCSRSTSESTAALGCLVKDYFPEPVTVSWNS |
| | | GALTSGVHTFPAVLQSSGLYSLSSVVTVPSSNFGTQTYTCNVD |
| | | HKPSNTKVDKTVERKSCVACPPCPAPPVAGPSVFLFPPKPKDT |
| | | LMISRTPEVTCVVVDVSHEDPEVQFNWYVDGVEVHNAKTKPRE |
| | | EQFNSTFRVVSVLTVVHQDWLNGKEYKCKVSNKGLPAPIEKTI |
| | | SKTKGQPREPQVYTLPPSREEMTKNQVSLTCLVKGFYPSDIAV |
| | | EWESNGQPENNYKTTPPMLDSDGSFFLYSKLTVDKSRWQQGNV |
| | | FSCSVMHEALHNHYTQKSLSLSPGK |
| 208 | IgG2.3-R133A | ASTKGPSVFPLAPCSASTSESTAALGCLVKDYFPEPVTVSWNS |
| | | GALTSGVHTFPAVLQSSGLYSLSSVVTVPSSNFGTQTYTCNVD |
| | | HKPSNTKVDKTVERKSCVECPPCPAPPVAGPSVFLFPPKPKDT |
| | | LMISRTPEVTCVVVDVSHEDPEVQFNWYVDGVEVHNAKTKPRE |
| | | EQFNSTFRVVSVLTVVHQDWLNGKEYKCKVSNKGLPAPIEKTI |
| | | SKTKGQPREPQVYTLPPSREEMTKNQVSLTCLVKGFYPSDIAV |
| | | EWESNGQPENNYKTTPPMLDSDGSFFLYSKLTVDKSRWQQGNV |
| | | FSCSVMHEALHNHYTQKSLSLSPGK |
| 209 | IgG2.3-E137D | ASTKGPSVFPLAPCSRSTSDSTAALGCLVKDYFPEPVTVSWNS |
| | | GALTSGVHTFPAVLQSSGLYSLSSVVTVPSSNFGTQTYTCNVD |
| | | HKPSNTKVDKTVERKSCVECPPCPAPPVAGPSVFLFPPKPKDT |
| | | LMISRTPEVTCVVVDVSHEDPEVQFNWYVDGVEVHNAKTKPRE |
| | | EQFNSTFRVVSVLTVVHQDWLNGKEYKCKVSNKGLPAPIEKTI |
| | | SKTKGQPREPQVYTLPPSREEMTKNQVSLTCLVKGFYPSDIAV |
| | | EWESNGQPENNYKTTPPMLDSDGSFFLYSKLTVDKSRWQQGNV |
| | | FSCSVMHEALHNHYTQKSLSLSPGK |
| 210 | IgG2.3-E137Q | ASTKGPSVFPLAPCSRSTSQSTAALGCLVKDYFPEPVTVSWNS |
| | | GALTSGVHTFPAVLQSSGLYSLSSVVTVPSSNFGTQTYTCNVD |
| | | HKPSNTKVDKTVERKSCVECPPCPAPPVAGPSVFLFPPKPKDT |
| | | LMISRTPEVTCVVVDVSHEDPEVQFNWYVDGVEVHNAKTKPRE |
| | | EQFNSTFRVVSVLTVVHQDWLNGKEYKCKVSNKGLPAPIEKTI |
| | | SKTKGQPREPQVYTLPPSREEMTKNQVSLTCLVKGFYPSDIAV |
| | | EWESNGQPENNYKTTPPMLDSDGSFFLYSKLTVDKSRWQQGNV |
| | | FSCSVMHEALHNHYTQKSLSLSPGK |
| 211 | IgG2.3-S138T | ASTKGPSVFPLAPCSRSTSETTAALGCLVKDYFPEPVTVSWNS |
| | | GALTSGVHTFPAVLQSSGLYSLSSVVTVPSSNFGTQTYTCNVD |
| | | HKPSNTKVDKTVERKSCVECPPCPAPPVAGPSVFLFPPKPKDT |
| | | LMISRTPEVTCVVVDVSHEDPEVQFNWYVDGVEVHNAKTKPRE |
| | | EQFNSTFRVVSVLTVVHQDWLNGKEYKCKVSNKGLPAPIEKTI |
| | | SKTKGQPREPQVYTLPPSREEMTKNQVSLTCLVKGFYPSDIAV |
| | | EWESNGQPENNYKTTPPMLDSDGSFFLYSKLTVDKSRWQQGNV |
| | | FSCSVMHEALHNHYTQKSLSLSPGK |
| 212 | IgG2.3-S138E | ASTKGPSVFPLAPCSRSTSEETAALGCLVKDYFPEPVTVSWNS |
| | | GALTSGVHTFPAVLQSSGLYSLSSVVTVPSSNFGTQTYTCNVD |
| | | HKPSNTKVDKTVERKSCVECPPCPAPPVAGPSVFLFPPKPKDT |
| | | LMISRTPEVTCVVVDVSHEDPEVQFNWYVDGVEVHNAKTKPRE |
| | | EQFNSTFRVVSVLTVVHQDWLNGKEYKCKVSNKGLPAPIEKTI |
| | | SKTKGQPREPQVYTLPPSREEMTKNQVSLTCLVKGFYPSDIAV |
| | | EWESNGQPENNYKTTPPMLDSDGSFFLYSKLTVDKSRWQQGNV |
| | | FSCSVMHEALHNHYTQKSLSLSPGK |
| 213 | IgG2.3-E137A-S138I | ASTKGPSVFPLAPCSRSTSAITAALGCLVKDYFPEPVTVSWNS |
| | | GALTSGVHTFPAVLQSSGLYSLSSVVTVPSSNFGTQTYTCNVD |
| | | HKPSNTKVDKTVERKSCVECPPCPAPPVAGPSVFLFPPKPKDT |
| | | LMISRTPEVTCVVVDVSHEDPEVQFNWYVDGVEVHNAKTKPRE |
| | | EQFNSTFRVVSVLTVVHQDWLNGKEYKCKVSNKGLPAPIEKTI |
| | | SKTKGQPREPQVYTLPPSREEMTKNQVSLTCLVKGFYPSDIAV |
| | | EWESNGQPENNYKTTPPMLDSDGSFFLYSKLTVDKSRWQQGNV |
| | | FSCSVMHEALHNHYTQKSLSLSPGK |
| 214 | IgG2.3-E137I-S138A | ASTKGPSVFPLAPCSRSTSIATAALGCLVKDYFPEPVTVSWNS |
| | | GALTSGVHTFPAVLQSSGLYSLSSVVTVPSSNFGTQTYTCNVD |
| | | HKPSNTKVDKTVERKSCVECPPCPAPPVAGPSVFLFPPKPKDT |
| | | LMISRTPEVTCVVVDVSHEDPEVQFNWYVDGVEVHNAKTKPRE |
| | | EQFNSTFRVVSVLTVVHQDWLNGKEYKCKVSNKGLPAPIEKTI |
| | | SKTKGQPREPQVYTLPPSREEMTKNQVSLTCLVKGFYPSDIAV |
| | | EWESNGQPENNYKTTPPMLDSDGSFFLYSKLTVDKSRWQQGNV |
| | | FSCSVMHEALHNHYTQKSLSLSPGK |
| 215 | IgG2.3-R217G | ASTKGPSVFPLAPCSRSTSESTAALGCLVKDYFPEPVTVSWNS |
| | | GALTSGVHTFPAVLQSSGLYSLSSVVTVPSSNFGTQTYTCNVD |
| | | HKPSNTKVDKTVEGKSCVECPPCPAPPVAGPSVFLFPPKPKDT |
| | | LMISRTPEVTCVVVDVSHEDPEVQFNWYVDGVEVHNAKTKPRE |
| | | EQFNSTFRVVSVLTVVHQDWLNGKEYKCKVSNKGLPAPIEKTI |
| | | SKTKGQPREPQVYTLPPSREEMTKNQVSLTCLVKGFYPSDIAV |
| | | EWESNGQPENNYKTTPPMLDSDGSFFLYSKLTVDKSRWQQGNV |
| | | FSCSVMHEALHNHYTQKSLSLSPGK |
| 216 | IgG2.3-R217A | ASTKGPSVFPLAPCSRSTSESTAALGCLVKDYFPEPVTVSWNS |
| | | GALTSGVHTFPAVLQSSGLYSLSSVVTVPSSNFGTQTYTCNVD |
| | | HKPSNTKVDKTVEAKSCVECPPCPAPPVAGPSVFLFPPKPKDT |
| | | LMISRTPEVTCVVVDVSHEDPEVQFNWYVDGVEVHNAKTKPRE |
| | | EQFNSTFRVVSVLTVVHQDWLNGKEYKCKVSNKGLPAPIEKTI |
| | | SKTKGQPREPQVYTLPPSREEMTKNQVSLTCLVKGFYPSDIAV |
| | | EWESNGQPENNYKTTPPMLDSDGSFFLYSKLTVDKSRWQQGNV |
| | | FSCSVMHEALHNHYTQKSLSLSPGK |
| 217 | IgG2.3-R217I | ASTKGPSVFPLAPCSRSTSESTAALGCLVKDYFPEPVTVSWNS |
| | | GALTSGVHTFPAVLQSSGLYSLSSVVTVPSSNFGTQTYTCNVD |
| | | HKPSNTKVDKTVEIKSCVECPPCPAPPVAGPSVFLFPPKPKDT |
| | | LMISRTPEVTCVVVDVSHEDPEVQFNWYVDGVEVHNAKTKPRE |
| | | EQFNSTFRVVSVLTVVHQDWLNGKEYKCKVSNKGLPAPIEKTI |
| | | SKTKGQPREPQVYTLPPSREEMTKNQVSLTCLVKGFYPSDIAV |
| | | EWESNGQPENNYKTTPPMLDSDGSFFLYSKLTVDKSRWQQGNV |
| | | FSCSVMHEALHNHYTQKSLSLSPGK |
| 218 | IgG2.3-R217E | ASTKGPSVFPLAPCSRSTSESTAALGCLVKDYFPEPVTVSWNS |
| | | GALTSGVHTFPAVLQSSGLYSLSSVVTVPSSNFGTQTYTCNVD |
| | | HKPSNTKVDKTVEEKSCVECPPCPAPPVAGPSVFLFPPKPKDT |
| | | LMISRTPEVTCVVVDVSHEDPEVQFNWYVDGVEVHNAKTKPRE |
| | | EQFNSTFRVVSVLTVVHQDWLNGKEYKCKVSNKGLPAPIEKTI |
| | | SKTKGQPREPQVYTLPPSREEMTKNQVSLTCLVKGFYPSDIAV |
| | | EWESNGQPENNYKTTPPMLDSDGSFFLYSKLTVDKSRWQQGNV |
| | | FSCSVMHEALHNHYTQKSLSLSPGK |
| 219 | IgG2.3-R217K | ASTKGPSVFPLAPCSRSTSESTAALGCLVKDYFPEPVTVSWNS |
| | | GALTSGVHTFPAVLQSSGLYSLSSVVTVPSSNFGTQTYTCNVD |
| | | HKPSNTKVDKTVEKKSCVECPPCPAPPVAGPSVFLFPPKPKDT |
| | | LMISRTPEVTCVVVDVSHEDPEVQFNWYVDGVEVHNAKTKPRE |
| | | EQFNSTFRVVSVLTVVHQDWLNGKEYKCKVSNKGLPAPIEKTI |
| | | SKTKGQPREPQVYTLPPSREEMTKNQVSLTCLVKGFYPSDIAV |
| | | EWESNGQPENNYKTTPPMLDSDGSFFLYSKLTVDKSRWQQGNV |
| | | FSCSVMHEALHNHYTQKSLSLSPGK |
| 220 | IgG2.3-V224I | ASTKGPSVFPLAPCSRSTSESTAALGCLVKDYFPEPVTVSWNS |
| | | GALTSGVHTFPAVLQSSGLYSLSSVVTVPSSNFGTQTYTCNVD |
| | | HKPSNTKVDKTVERKSCIECPPCPAPPVAGPSVFLFPPKPKDT |
| | | LMISRTPEVTCVVVDVSHEDPEVQFNWYVDGVEVHNAKTKPRE |
| | | EQFNSTFRVVSVLTVVHQDWLNGKEYKCKVSNKGLPAPIEKTI |
| | | SKTKGQPREPQVYTLPPSREEMTKNQVSLTCLVKGFYPSDIAV |
| | | EWESNGQPENNYKTTPPMLDSDGSFFLYSKLTVDKSRWQQGNV |
| | | FSCSVMHEALHNHYTQKSLSLSPGK |
| 221 | IgG2.3-E225D | ASTKGPSVFPLAPCSRSTSESTAALGCLVKDYFPEPVTVSWNS |
| | | GALTSGVHTFPAVLQSSGLYSLSSVVTVPSSNFGTQTYTCNVD |
| | | HKPSNTKVDKTVERKSCVDCPPCPAPPVAGPSVFLFPPKPKDT |
| | | LMISRTPEVTCVVVDVSHEDPEVQFNWYVDGVEVHNAKTKPRE |
| | | EQFNSTFRVVSVLTVVHQDWLNGKEYKCKVSNKGLPAPIEKTI |
| | | SKTKGQPREPQVYTLPPSREEMTKNQVSLTCLVKGFYPSDIAV |
| | | EWESNGQPENNYKTTPPMLDSDGSFFLYSKLTVDKSRWQQGNV |
| | | FSCSVMHEALHNHYTQKSLSLSPGK |
| 222 | IgG2-G4.1-G4-G4 | ASTKGPSVFPLAPCSRSTSESTAALGCLVKDYFPEPVTVSWNS |
| | | GALTSGVHTFPAVLQSSGLYSLSSVVTVPSSNFGTQTYTCNVD |
| | | HKPSNTKVDKTVERKYGPPCPPCPAPEFLGGPSVFLFPPKPKD |
| | | TLMISRTPEVTCVVVDVSQEDPEVQFNWYVDGVEVHNAKTKPR |
| | | EEQFNSTYRVVSVLTVLHQDWLNGKEYKCKVSNKGLPSSIEKT |
| | | ISKAKGQPREPQVYTLPPSQEEMTKNQVSLTCLVKGFYPSDIA |
| | | VEWESNGQPENNYKTTPPVLDSDGSFFLYSRLTVDKSRWQEGN |
| | | VFSCSVMHEALHNHYTQKSLSLSLGK |
| 223 | IgG4-G2.3-G2-G2 | ASTKGPSVFPLAPCSRSTSESTAALGCLVKDYFPEPVTVSWNS |
| | | GALTSGVHTFPAVLQSSGLYSLSSVVTVPSSSLGTKTYTCNVD |
| | | HKPSNTKVDKRVESKSCVECPPCPAPPVAGPSVFLFPPKPKDT |
| | | LMISRTPEVTCVVVDVSHEDPEVQFNWYVDGVEVHNAKTKPRE |
| | | EQFNSTFRVVSVLTVVHQDWLNGKEYKCKVSNKGLPAPIEKTI |
| | | SKTKGQPREPQVYTLPPSREEMTKNQVSLTCLVKGFYPSDIAV |
| | | EWESNGQPENNYKTTPPMLDSDGSFFLYSKLTVDKSRWQQGNV |
| | | FSCSVMHEALHNHYTQKSLSLSPGK |
| 224 | IgG2-G4.1-G2-G2 | ASTKGPSVFPLAPCSRSTSESTAALGCLVKDYFPEPVTVSWNS |
| | | GALTSGVHTFPAVLQSSGLYSLSSVVTVPSSNFGTQTYTCNVD |
| | | HKPSNTKVDKTVERKYGPPCPPCPAPEFLGGPSVFLFPPKPKD |
| | | TLMISRTPEVTCVVVDVSHEDPEVQFNWYVDGVEVHNAKTKPR |
| | | EEQFNSTFRVVSVLTVVHQDWLNGKEYKCKVSNKGLPAPIEKT |
| | | ISKTKGQPREPQVYTLPPSREEMTKNQVSLTCLVKGFYPSDIA |
| | | VEWESNGQPENNYKTTPPMLDSDGSFFLYSKLTVDKSRWQQGN |
| | | VFSCSVMHEALHNHYTQKSLSLSPGK |
| 225 | IgG4-G2.3-G4-G4 | ASTKGPSVFPLAPCSRSTSESTAALGCLVKDYFPEPVTVSWNS |
| | | GALTSGVHTFPAVLQSSGLYSLSSVVTVPSSSLGTKTYTCNVD |
| | | HKPSNTKVDKRVESKSCVECPPCPAPPVAGPSVFLFPPKPKDT |
| | | LMISRTPEVTCVVVDVSQEDPEVQFNWYVDGVEVHNAKTKPRE |
| | | EQFNSTYRVVSVLTVLHQDWLNGKEYKCKVSNKGLPSSIEKTI |
| | | SKAKGQPREPQVYTLPPSQEEMTKNQVSLTCLVKGFYPSDIAV |
| | | EWESNGQPENNYKTTPPVLDSDGSFFLYSRLTVDKSRWQEGNV |
| | | FSCSVMHEALHNHYTQKSLSLSLGK |
| 226 | IgG2-G2.3-G4-G4 | ASTKGPSVFPLAPCSRSTSESTAALGCLVKDYFPEPVTVSWNS |
| | | GALTSGVHTFPAVLQSSGLYSLSSVVTVPSSNFGTQTYTCNVD |
| | | HKPSNTKVDKTVERKSCVECPPCPAPPVAGPSVFLFPPKPKDT |
| | | LMISRTPEVTCVVVDVSQEDPEVQFNWYVDGVEVHNAKTKPRE |
| | | EQFNSTYRVVSVLTVLHQDWLNGKEYKCKVSNKGLPSSIEKTI |
| | | SKAKGQPREPQVYTLPPSQEEMTKNQVSLTCLVKGFYPSDIAV |
| | | EWESNGQPENNYKTTPPVLDSDGSFFLYSRLTVDKSRWQEGNV |
| | | FSCSVMHEALHNHYTQKSLSLSLGK |
| 227 | IgG4-G4.1-G2-G2 | ASTKGPSVFPLAPCSRSTSESTAALGCLVKDYFPEPVTVSWNS |
| | | GALTSGVHTFPAVLQSSGLYSLSSVVTVPSSSLGTKTYTCNVD |
| | | HKPSNTKVDKRVESKYGPPCPPCPAPEFLGGPSVFLFPPKPKD |
| | | TLMISRTPEVTCVVVDVSHEDPEVQFNWYVDGVEVHNAKTKPR |
| | | EEQFNSTFRVVSVLTVVHQDWLNGKEYKCKVSNKGLPAPIEKT |
| | | ISKTKGQPREPQVYTLPPSREEMTKNQVSLTCLVKGFYPSDIA |
| | | VEWESNGQPENNYKTTPPMLDSDGSFFLYSKLTVDKSRWQQGN |
| | | VFSCSVMHEALHNHYTQKSLSLSPGK |
| 228 | IgG4-G4.1-G1-G1 | ASTKGPSVFPLAPCSRSTSESTAALGCLVKDYFPEPVTVSWNS |
| | | GALTSGVHTFPAVLQSSGLYSLSSVVTVPSSSLGTKTYTCNVD |
| | | HKPSNTKVDKRVESKYGPPCPPCPAPEFLGGPSVFLFPPKPKD |
| | | TLMISRTPEVTCVVVDVSHEDPEVKFNWYVDGVEVHNAKTKPR |
| | | EEQYNSTYRVVSVLTVLHQDWLNGKEYKCKVSNKALPAPIEKT |
| | | ISKAKGQPREPQVYTLPPSREEMTKNQVSLTCLVKGFYPSDIA |
| | | VEWESNGQPENNYKTTPPVLDSDGSFFLYSKLTVDKSRWQQGN |
| | | VFSCSVMHEALHNHYTQKSLSLSPGK |
| 229 | IgG4.1 | ASTKGPSVFPLAPCSRSTSESTAALGCLVKDYFPEPVTVSWNS |
| | | GALTSGVHTFPAVLQSSGLYSLSSVVTVPSSSLGTKTYTCNVD |
| | | HKPSNTKVDKRVESKYGPPCPPCPAPEFLGGPSVFLFPPKPKD |
| | | TLMISRTPEVTCVVVDVSQEDPEVQFNWYVDGVEVHNAKTKPR |
| | | EEQFNSTYRVVSVLTVLHQDWLNGKEYKCKVSNKGLPSSIEKT |
| | | ISKAKGQPREPQVYTLPPSQEEMTKNQVSLTCLVKGFYPSDIA |
| | | VEWESNGQPENNYKTTPPVLDSDGSFFLYSRLTVDKSRWQEGN |
| | | VFSCSVMHEALHNHYTQKSLSLSLGK |
| 230 | IgG4.1-R214T | ASTKGPSVFPLAPCSRSTSESTAALGCLVKDYFPEPVTVSWNS |
| | | GALTSGVHTFPAVLQSSGLYSLSSVVTVPSSSLGTKTYTCNVD |
| | | HKPSNTKVDKTVESKYGPPCPPCPAPEFLGGPSVFLFPPKPKD |
| | | TLMISRTPEVTCVVVDVSQEDPEVQFNWYVDGVEVHNAKTKPR |
| | | EEQFNSTYRVVSVLTVLHQDWLNGKEYKCKVSNKGLPSSIEKT |
| | | ISKAKGQPREPQVYTLPPSQEEMTKNQVSLTCLVKGFYPSDIA |
| | | VEWESNGQPENNYKTTPPVLDSDGSFFLYSRLTVDKSRWQEGN |
| | | VFSCSVMHEALHNHYTQKSLSLSLGK |
| 231 | IgG4.1-S217R | ASTKGPSVFPLAPCSRSTSESTAALGCLVKDYFPEPVTVSWNS |
| | | GALTSGVHTFPAVLQSSGLYSLSSVVTVPSSSLGTKTYTCNVD |
| | | HKPSNTKVDKRVERKYGPPCPPCPAPEFLGGPSVFLFPPKPKD |
| | | TLMISRTPEVTCVVVDVSQEDPEVQFNWYVDGVEVHNAKTKPR |
| | | EEQFNSTYRVVSVLTVLHQDWLNGKEYKCKVSNKGLPSSIEKT |
| | | ISKAKGQPREPQVYTLPPSQEEMTKNQVSLTCLVKGFYPSDIA |
| | | VEWESNGQPENNYKTTPPVLDSDGSFFLYSRLTVDKSRWQEGN |
| | | VFSCSVMHEALHNHYTQKSLSLSLGK |
| 232 | IgG4.1-S217P | ASTKGPSVFPLAPCSRSTSESTAALGCLVKDYFPEPVTVSWNS |
| | | GALTSGVHTFPAVLQSSGLYSLSSVVTVPSSSLGTKTYTCNVD |
| | | HKPSNTKVDKRVEPKYGPPCPPCPAPEFLGGPSVFLFPPKPKD |
| | | TLMISRTPEVTCVVVDVSQEDPEVQFNWYVDGVEVHNAKTKPR |
| | | EEQFNSTYRVVSVLTVLHQDWLNGKEYKCKVSNKGLPSSIEKT |
| | | ISKAKGQPREPQVYTLPPSQEEMTKNQVSLTCLVKGFYPSDIA |
| | | VEWESNGQPENNYKTTPPVLDSDGSFFLYSRLTVDKSRWQEGN |
| | | VFSCSVMHEALHNHYTQKSLSLSLGK |
| 233 | IgG1fa | ASTKGPSVFPLAPSSKSTSGGTAALGCLVKDYFPEPVTVSWNS |
| | | GALTSGVHTFPAVLQSSGLYSLSSVVTVPSSSLGTQTYICNVN |
| | | HKPSNTKVDKRVEPKSCDKTHTCPPCPAPELLGGPSVFLFPPK |
| | | PKDTLMISRTPEVTCVVVDVSHEDPEVKFNWYVDGVEVHNAKT |
| | | KPREEQYNSTYRVVSVLTVLHQDWLNGKEYKCKVSNKALPAPI |
| | | EKTISKAKGQPREPQVYTLPPSRDELTKNQVSLTCLVKGFYPS |
| | | DIAVEWESNGQPENNYKTTPPVLDSDGSFFLYSKLTVDKSRWQ |
| | | QGNVFSCSVMHEALHNHYTQKSLSLSPG |
| 234 | IgG1.3fa | ASTKGPSVFPLAPSSKSTSGGTAALGCLVKDYFPEPVTVSWNS |
| | | GALTSGVHTFPAVLQSSGLYSLSSVVTVPSSSLGTQTYICNVN |
| | | HKPSNTKVDKRVEPKSCDKTHTCPPCPAPEAEGAPSVFLFPPK |
| | | PKDTLMISRTPEVTCVVVDVSHEDPEVKFNWYVDGVEVHNAKT |
| | | KPREEQYNSTYRVVSVLTVLHQDWLNGKEYKCKVSNKALPAPI |
| | | EKTISKAKGQPREPQVYTLPPSRDELTKNQVSLTCLVKGFYPS |
| | | DIAVEWESNGQPENNYKTTPPVLDSDGSFFLYSKLTVDKSRWQ |
| | | QGNVFSCSVMHEALHNHYTQKSLSLSPGK |
| 235 | IgG1fa-P238K | ASTKGPSVFPLAPSSKSTSGGTAALGCLVKDYFPEPVTVSWNS |
| | | GALTSGVHTFPAVLQSSGLYSLSSVVTVPSSSLGTQTYICNVN |
| | | HKPSNTKVDKRVEPKSCDKTHTCPPCPAPELLGGKSVFLFPPK |
| | | PKDTLMISRTPEVTCVVVDVSHEDPEVKFNWYVDGVEVHNAKT |
| | | KPREEQYNSTYRVVSVLTVLHQDWLNGKEYKCKVSNKALPAPI |
| | | EKTISKAKGQPREPQVYTLPPSRDELTKNQVSLTCLVKGFYPS |
| | | DIAVEWESNGQPENNYKTTPPVLDSDGSFFLYSKLTVDKSRWQ |
| | | QGNVFSCSVMHEALHNHYTQKSLSLSPGK |
| 236 | IgG1.3fa-P238K | ASTKGPSVFPLAPSSKSTSGGTAALGCLVKDYFPEPVTVSWNS |
| | | GALTSGVHTFPAVLQSSGLYSLSSVVTVPSSSLGTQTYICNVN |
| | | HKPSNTKVDKRVEPKSCDKTHTCPPCPAPEAEGAKSVFLFPPK |
| | | PKDTLMISRTPEVTCVVVDVSHEDPEVKFNWYVDGVEVHNAKT |
| | | KPREEQYNSTYRVVSVLTVLHQDWLNGKEYKCKVSNKALPAPI |
| | | EKTISKAKGQPREPQVYTLPPSRDELTKNQVSLTCLVKGFYPS |
| | | DIAVEWESNGQPENNYKTTPPVLDSDGSFFLYSKLTVDKSRWQ |
| | | QGNVFSCSVMHEALHNHYTQKSLSLSPGK |
| 237 | IgG1fa-L235E-P238K | ASTKGPSVFPLAPSSKSTSGGTAALGCLVKDYFPEPVTVSWNS |
| | | GALTSGVHTFPAVLQSSGLYSLSSVVTVPSSSLGTQTYICNVN |
| | | HKPSNTKVDKRVEPKSCDKTHTCPPCPAPELEGGKSVFLFPPK |
| | | PKDTLMISRTPEVTCVVVDVSHEDPEVKFNWYVDGVEVHNAKT |
| | | KPREEQYNSTYRVVSVLTVLHQDWLNGKEYKCKVSNKALPAPI |
| | | EKTISKAKGQPREPQVYTLPPSRDELTKNQVSLTCLVKGFYPS |
| | | DIAVEWESNGQPENNYKTTPPVLDSDGSFFLYSKLTVDKSRWQ |
| | | QGNVFSCSVMHEALHNHYTQKSLSLSPGK |
| 238 | IgG1fa-L235A-P238K | ASTKGPSVFPLAPSSKSTSGGTAALGCLVKDYFPEPVTVSWNS |
| | | GALTSGVHTFPAVLQSSGLYSLSSVVTVPSSSLGTQTYICNVN |
| | | HKPSNTKVDKRVEPKSCDKTHTCPPCPAPELAGGKSVFLFPPK |
| | | PKDTLMISRTPEVTCVVVDVSHEDPEVKFNWYVDGVEVHNAKT |
| | | KPREEQYNSTYRVVSVLTVLHQDWLNGKEYKCKVSNKALPAPI |
| | | EKTISKAKGQPREPQVYTLPPSRDELTKNQVSLTCLVKGFYPS |
| | | DIAVEWESNGQPENNYKTTPPVLDSDGSFFLYSKLTVDKSRWQ |
| | | QGNVFSCSVMHEALHNHYTQKSLSLSPGK |
| 239 | IgG1fa-L235E-P238K-K322A | ASTKGPSVFPLAPSSKSTSGGTAALGCLVKDYFPEPVTVSWNS |
| | | GALTSGVHTFPAVLQSSGLYSLSSVVTVPSSSLGTQTYICNVN |
| | | HKPSNTKVDKRVEPKSCDKTHTCPPCPAPELEGGKSVFLFPPK |
| | | PKDTLMISRTPEVTCVVVDVSHEDPEVKFNWYVDGVEVHNAKT |
| | | KPREEQYNSTYRVVSVLTVLHQDWLNGKEYKCAVSNKALPAPI |
| | | EKTISKAKGQPREPQVYTLPPSRDELTKNQVSLTCLVKGFYPS |
| | | DIAVEWESNGQPENNYKTTPPVLDSDGSFFLYSKLTVDKSRWQ |
| | | QGNVFSCSVMHEALHNHYTQKSLSLSPGK |
| 240 | IgG2.3 | ASTKGPSVFPLAPCSRSTSESTAALGCLVKDYFPEPVTVSWNS |
| | | GALTSGVHTFPAVLQSSGLYSLSSVVTVPSSNFGTQTYTCNVD |
| | | HKPSNTKVDKTVERKSCVECPPCPAPPVAGPSVFLFPPKPKDT |
| | | LMISRTPEVTCVVVDVSHEDPEVQFNWYVDGVEVHNAKTKPRE |
| | | EQFNSTFRVVSVLTVVHQDWLNGKEYKCKVSNKGLPAPIEKTI |
| | | SKTKGQPREPQVYTLPPSREEMTKNQVSLTCLVKGFYPSDIAV |
| | | EWESNGQPENNYKTTPPMLDSDGSFFLYSKLTVDKSRWQQGNV |
| | | FSCSVMHEALHNHYTQKSLSLSPGK |
| 241 | IgG2.3-P238K | ASTKGPSVFPLAPCSRSTSESTAALGCLVKDYFPEPVTVSWNS |
| | | GALTSGVHTFPAVLQSSGLYSLSSVVTVPSSNFGTQTYTCNVD |
| | | HKPSNTKVDKTVERKSCVECPPCPAPPVAGKSVFLFPPKPKDT |
| | | LMISRTPEVTCVVVDVSHEDPEVQFNWYVDGVEVHNAKTKPRE |
| | | EQFNSTFRVVSVLTVVHQDWLNGKEYKCKVSNKGLPAPIEKTI |
| | | SKTKGQPREPQVYTLPPSREEMTKNQVSLTCLVKGFYPSDIAV |
| | | EWESNGQPENNYKTTPPMLDSDGSFFLYSKLTVDKSRWQQGNV |
| | | FSCSVMHEALHNHYTQKSLSLSPGK |
| 242 | IgG2.3G1 | ASTKGPSVFPLAPCSRSTSESTAALGCLVKDYFPEPVTVSWNS |
| | | GALTSGVHTFPAVLQSSGLYSLSSVVTVPSSNFGTQTYTCNVD |
| | | HKPSNTKVDKTVERKSCVECPPCPAPELLGGPSVFLFPPKPKD |
| | | TLMISRTPEVTCVVVDVSHEDPEVKFNWYVDGVEVHNAKTKPR |
| | | EEQYNSTYRVVSVLTVLHQDWLNGKEYKCKVSNKALPAPIEKT |
| | | ISKAKGQPREPQVYTLPPSREEMTKNQVSLTCLVKGFYPSDIA |
| | | VEWESNGQPENNYKTTPPVLDSDGSFFLYSKLTVDKSRWQQGN |
| | | VFSCSVMHEALHNHYTQKSLSLSPGK |
| 243 | IgG2.3G1-P238K | ASTKGPSVFPLAPCSRSTSESTAALGCLVKDYFPEPVTVSWNS |
| | | GALTSGVHTFPAVLQSSGLYSLSSVVTVPSSNFGTQTYTCNVD |
| | | HKPSNTKVDKTVERKSCVECPPCPAPELLGGKSVFLFPPKPKD |
| | | TLMISRTPEVTCVVVDVSHEDPEVKFNWYVDGVEVHNAKTKPR |
| | | EEQYNSTYRVVSVLTVLHQDWLNGKEYKCKVSNKALPAPIEKT |
| | | ISKAKGQPREPQVYTLPPSREEMTKNQVSLTCLVKGFYPSDIA |
| | | VEWESNGQPENNYKTTPPVLDSDGSFFLYSKLTVDKSRWQQGN |
| | | VFSCSVMHEALHNHYTQKSLSLSPGK |
| 244 | IgG2.3G1-L235E-P238K | ASTKGPSVFPLAPCSRSTSESTAALGCLVKDYFPEPVTVSWNS |
| | | GALTSGVHTFPAVLQSSGLYSLSSVVTVPSSNFGTQTYTCNVD |
| | | HKPSNTKVDKTVERKSCVECPPCPAPELEGGKSVFLFPPKPKD |
| | | TLMISRTPEVTCVVVDVSHEDPEVKFNWYVDGVEVHNAKTKPR |
| | | EEQYNSTYRVVSVLTVLHQDWLNGKEYKCKVSNKALPAPIEKT |
| | | ISKAKGQPREPQVYTLPPSREEMTKNQVSLTCLVKGFYPSDIA |
| | | VEWESNGQPENNYKTTPPVLDSDGSFFLYSKLTVDKSRWQQGN |
| | | VFSCSVMHEALHNHYTQKSLSLSPGK |
| 245 | IgG2.5G1-P238K | ASTKGPSVFPLAPSSRSTSESTAALGCLVKDYFPEPVTVSWNS |
| | | GALTSGVHTFPAVLQSSGLYSLSSVVTVPSSNFGTQTYTCNVD |
| | | HKPSNTKVDKTVERKCCVECPPCPAPELLGGKSVFLFPPKPKD |
| | | TLMISRTPEVTCVVVDVSHEDPEVKFNWYVDGVEVHNAKTKPR |
| | | EEQYNSTYRVVSVLTVLHQDWLNGKEYKCKVSNKALPAPIEKT |
| | | ISKAKGQPREPQVYTLPPSREEMTKNQVSLTCLVKGFYPSDIA |
| | | VEWESNGQPENNYKTTPPVLDSDGSFFLYSKLTVDKSRWQQGN |
| | | VFSCSVMHEALHNHYTQKSLSLSPGK |
| 246 | hIgG1f | ASTKGPSVFPLAPSSKSTSGGTAALGCLVKDYFPEPVTVSWNS |
| | | GALTSGVHTFPAVLQSSGLYSLSSVVTVPSSSLGTQTYICNVN |
| | | HKPSNTKVDKRVEPKSCDKTHTCPPCPAPELLGGPSVFLFPPK |
| | | PKDTLMISRTPEVTCVVVDVSHEDPEVKFNWYVDGVEVHNAKT |
| | | KPREEQYNSTYRVVSVLTVLHQDWLNGKEYKCKVSNKALPAPI |
| | | EKTISKAKGQPREPQVYTLPPSREEMTKNQVSLTCLVKGFYPS |
| | | DIAVEWESNGQPENNYKTTPPVLDSDGSFFLYSKLTVDKSRWQ |
| | | QGNVFSCSVMHEALHNHYTQKSLSLSPGK |
| 247 | hIgG1f-P238K | ASTKGPSVFPLAPSSKSTSGGTAALGCLVKDYFPEPVTVSWNS |
| | | GALTSGVHTFPAVLQSSGLYSLSSVVTVPSSSLGTQTYICNVN |
| | | HKPSNTKVDKRVEPKSCDKTHTCPPCPAPELLGGKSVFLFPPK |
| | | PKDTLMISRTPEVTCVVVDVSHEDPEVKFNWYVDGVEVHNAKT |
| | | KPREEQYNSTYRVVSVLTVLHQDWLNGKEYKCKVSNKALPAPI |
| | | EKTISKAKGQPREPQVYTLPPSREEMTKNQVSLTCLVKGFYPS |
| | | DIAVEWESNGQPENNYKTTPPVLDSDGSFFLYSKLTVDKSRWQ |
| | | QGNVFSCSVMHEALHNHYTQKSLSLSPGK |
| 248 | hIgG1.3f | ASTKGPSVFPLAPSSKSTSGGTAALGCLVKDYFPEPVTVSWNS |
| | | GALTSGVHTFPAVLQSSGLYSLSSVVTVPSSSLGTQTYICNVN |
| | | HKPSNTKVDKRVEPKSCDKTHTCPPCPAPEAEGAPSVFLFPPK |
| | | PKDTLMISRTPEVTCVVVDVSHEDPEVKFNWYVDGVEVHNAKT |
| | | KPREEQYNSTYRVVSVLTVLHQDWLNGKEYKCKVSNKALPAPI |
| | | EKTISKAKGQPREPQVYTLPPSREEMTKNQVSLTCLVKGFYPS |
| | | DIAVEWESNGQPENNYKTTPPVLDSDGSFFLYSKLTVDKSRWQ |
| | | QGNVFSCSVMHEALHNHYTQKSLSLSPGK |
| 249 | hIgG1.3f-P238K | ASTKGPSVFPLAPSSKSTSGGTAALGCLVKDYFPEPVTVSWNS |
| | | GALTSGVHTFPAVLQSSGLYSLSSVVTVPSSSLGTQTYICNVN |
| | | HKPSNTKVDKRVEPKSCDKTHTCPPCPAPEAEGAKSVFLFPPK |
| | | PKDTLMISRTPEVTCVVVDVSHEDPEVKFNWYVDGVEVHNAKT |
| | | KPREEQYNSTYRVVSVLTVLHQDWLNGKEYKCKVSNKALPAPI |
| | | EKTISKAKGQPREPQVYTLPPSREEMTKNQVSLTCLVKGFYPS |
| | | DIAVEWESNGQPENNYKTTPPVLDSDGSFFLYSKLTVDKSRWQ |
| | | QGNVFSCSVMHEALHNHYTQKSLSLSPGK |
| 250 | hIgG1f-L235E-P238K | ASTKGPSVFPLAPSSKSTSGGTAALGCLVKDYFPEPVTVSWNS |
| | | GALTSGVHTFPAVLQSSGLYSLSSVVTVPSSSLGTQTYICNVN |
| | | HKPSNTKVDKRVEPKSCDKTHTCPPCPAPELEGGKSVFLFPPK |
| | | PKDTLMISRTPEVTCVVVDVSHEDPEVKFNWYVDGVEVHNAKT |
| | | KPREEQYNSTYRVVSVLTVLHQDWLNGKEYKCKVSNKALPAPI |
| | | EKTISKAKGQPREPQVYTLPPSREEMTKNQVSLTCLVKGFYPS |
| | | DIAVEWESNGQPENNYKTTPPVLDSDGSFFLYSKLTVDKSRWQ |
| | | QGNVFSCSVMHEALHNHYTQKSLSLSPGK |
| 251 | hIgG1f-L235E-P238K-K322A | ASTKGPSVFPLAPSSKSTSGGTAALGCLVKDYFPEPVTVSWNS |
| | | GALTSGVHTFPAVLQSSGLYSLSSVVTVPSSSLGTQTYICNVN |
| | | HKPSNTKVDKRVEPKSCDKTHTCPPCPAPELEGGKSVFLFPPK |
| | | PKDTLMISRTPEVTCVVVDVSHEDPEVKFNWYVDGVEVHNAKT |
| | | KPREEQYNSTYRVVSVLTVLHQDWLNGKEYKCAVSNKALPAPI |
| | | EKTISKAKGQPREPQVYTLPPSREEMTKNQVSLTCLVKGFYPS |
| | | DIAVEWESNGQPENNYKTTPPVLDSDGSFFLYSKLTVDKSRWQ |
| | | QGNVFSCSVMHEALHNHYTQKSLSLSPGK |
| 252 | IgG2.3G1.3f | ASTKGPSVFPLAPCSRSTSESTAALGCLVKDYFPEPVTVSWNS |
| | | GALTSGVHTFPAVLQSSGLYSLSSVVTVPSSNFGTQTYTCNVD |
| | | HKPSNTKVDKTVERKSCVECPPCPAPEAEGAPSVFLFPPKPKD |
| | | TLMISRTPEVTCVVVDVSHEDPEVKFNWYVDGVEVHNAKTKPR |
| | | EEQYNSTYRVVSVLTVLHQDWLNGKEYKCKVSNKALPAPIEKT |
| | | ISKAKGQPREPQVYTLPPSREEMTKNQVSLTCLVKGFYPSDIA |
| | | VEWESNGQPENNYKTTPPVLDSDGSFFLYSKLTVDKSRWQQGN |
| | | VFSCSVMHEALHNHYTQKSLSLSPGK |
| 253 | IgG2.3G1.3f-P238K | ASTKGPSVFPLAPCSRSTSESTAALGCLVKDYFPEPVTVSWNS |
| | | GALTSGVHTFPAVLQSSGLYSLSSVVTVPSSNFGTQTYTCNVD |
| | | HKPSNTKVDKTVERKSCVECPPCPAPEAEGAKSVFLFPPKPKD |
| | | TLMISRTPEVTCVVVDVSHEDPEVKFNWYVDGVEVHNAKTKPR |
| | | EEQYNSTYRVVSVLTVLHQDWLNGKEYKCKVSNKALPAPIEKT |
| | | ISKAKGQPREPQVYTLPPSREEMTKNQVSLTCLVKGFYPSDIA |
| | | VEWESNGQPENNYKTTPPVLDSDGSFFLYSKLTVDKSRWQQGN |
| | | VFSCSVMHEALHNHYTQKSLSLSPGK |
| 244 | IgG2.3G1-L235E-P238K | ASTKGPSVFPLAPCSRSTSESTAALGCLVKDYFPEPVTVSWNS |
| | | GALTSGVHTFPAVLQSSGLYSLSSVVTVPSSNFGTQTYTCNVD |
| | | HKPSNTKVDKTVERKSCVECPPCPAPELEGGKSVFLFPPKPKD |
| | | TLMISRTPEVTCVVVDVSHEDPEVKFNWYVDGVEVHNAKTKPR |
| | | EEQYNSTYRVVSVLTVLHQDWLNGKEYKCKVSNKALPAPIEKT |
| | | ISKAKGQPREPQVYTLPPSREEMTKNQVSLTCLVKGFYPSDIA |
| | | VEWESNGQPENNYKTTPPVLDSDGSFFLYSKLTVDKSRWQQGN |
| | | VFSCSVMHEALHNHYTQKSLSLSPGK |
| 254 | IgG2.3G1-L235E-P238K-K322A | ASTKGPSVFPLAPCSRSTSESTAALGCLVKDYFPEPVTVSWNS |
| | | GALTSGVHTFPAVLQSSGLYSLSSVVTVPSSNFGTQTYTCNVD |
| | | HKPSNTKVDKTVERKSCVECPPCPAPELEGGKSVFLFPPKPKD |
| | | TLMISRTPEVTCVVVDVSHEDPEVKFNWYVDGVEVHNAKTKPR |
| | | EEQYNSTYRVVSVLTVLHQDWLNGKEYKCAVSNKALPAPIEKT |
| | | ISKAKGQPREPQVYTLPPSREEMTKNQVSLTCLVKGFYPSDIA |
| | | VEWESNGQPENNYKTTPPVLDSDGSFFLYSKLTVDKSRWQQGN |
| | | VFSCSVMHEALHNHYTQKSLSLSPGK |
| 255 | IgG2.5 | ASTKGPSVFPLAPSSRSTSESTAALGCLVKDYFPEPVTVSWNS |
| | | GALTSGVHTFPAVLQSSGLYSLSSVVTVPSSNFGTQTYTCNVD |
| | | HKPSNTKVDKTVERKCCVECPPCPAPPVAGPSVFLFPPKPKDT |
| | | LMISRTPEVTCVVVDVSHEDPEVQFNWYVDGVEVHNAKTKPRE |
| | | EQFNSTFRVVSVLTVVHQDWLNGKEYKCKVSNKGLPAPIEKTI |
| | | SKTKGQPREPQVYTLPPSREEMTKNQVSLTCLVKGFYPSDIAV |
| | | EWESNGQPENNYKTTPPMLDSDGSFFLYSKLTVDKSRWQQGNV |
| | | FSCSVMHEALHNHYTQKSLSLSPGK |
| 256 | IgG2.5-P238K | ASTKGPSVFPLAPSSRSTSESTAALGCLVKDYFPEPVTVSWNS |
| | | GALTSGVHTFPAVLQSSGLYSLSSVVTVPSSNFGTQTYTCNVD |
| | | HKPSNTKVDKTVERKCCVECPPCPAPPVAGKSVFLFPPKPKDT |
| | | LMISRTPEVTCVVVDVSHEDPEVQFNWYVDGVEVHNAKTKPRE |
| | | EQFNSTFRVVSVLTVVHQDWLNGKEYKCKVSNKGLPAPIEKTI |
| | | SKTKGQPREPQVYTLPPSREEMTKNQVSLTCLVKGFYPSDIAV |
| | | EWESNGQPENNYKTTPPMLDSDGSFFLYSKLTVDKSRWQQGNV |
| | | FSCSVMHEALHNHYTQKSLSLSPGK |
| 257 | IgG2.5G1 | ASTKGPSVFPLAPSSRSTSESTAALGCLVKDYFPEPVTVSWNS |
| | | GALTSGVHTFPAVLQSSGLYSLSSVVTVPSSNFGTQTYTCNVD |
| | | HKPSNTKVDKTVERKCCVECPPCPAPELLGGPSVFLFPPKPKD |
| | | TLMISRTPEVTCVVVDVSHEDPEVKFNWYVDGVEVHNAKTKPR |
| | | EEQYNSTYRVVSVLTVLHQDWLNGKEYKCKVSNKALPAPIEKT |
| | | ISKAKGQPREPQVYTLPPSREEMTKNQVSLTCLVKGFYPSDIA |
| | | VEWESNGQPENNYKTTPPVLDSDGSFFLYSKLTVDKSRWQQGN |
| | | VFSCSVMHEALHNHYTQKSLSLSPGK |
| 258 | IgG2.5G1-P238K | ASTKGPSVFPLAPSSRSTSESTAALGCLVKDYFPEPVTVSWNS |
| | | GALTSGVHTFPAVLQSSGLYSLSSVVTVPSSNFGTQTYTCNVD |
| | | HKPSNTKVDKTVERKCCVECPPCPAPELLGGKSVFLFPPKPKD |
| | | TLMISRTPEVTCVVVDVSHEDPEVKFNWYVDGVEVHNAKTKPR |
| | | EEQYNSTYRVVSVLTVLHQDWLNGKEYKCKVSNKALPAPIEKT |
| | | ISKAKGQPREPQVYTLPPSREEMTKNQVSLTCLVKGFYPSDIA |
| | | VEWESNGQPENNYKTTPPVLDSDGSFFLYSKLTVDKSRWQQGN |
| | | VFSCSVMHEALHNHYTQKSLSLSPGK |
| 259 | IgG2.5G1.3f | ASTKGPSVFPLAPSSRSTSESTAALGCLVKDYFPEPVTVSWNS |
| | | GALTSGVHTFPAVLQSSGLYSLSSVVTVPSSNFGTQTYTCNVD |
| | | HKPSNTKVDKTVERKCCVECPPCPAPEAEGAPSVFLFPPKPKD |
| | | TLMISRTPEVTCVVVDVSHEDPEVKFNWYVDGVEVHNAKTKPR |
| | | EEQYNSTYRVVSVLTVLHQDWLNGKEYKCKVSNKALPAPIEKT |
| | | ISKAKGQPREPQVYTLPPSREEMTKNQVSLTCLVKGFYPSDIA |
| | | VEWESNGQPENNYKTTPPVLDSDGSFFLYSKLTVDKSRWQQGN |
| | | VFSCSVMHEALHNHYTQKSLSLSPGK |
| 260 | IgG2.5G1.3f-P238K | ASTKGPSVFPLAPSSRSTSESTAALGCLVKDYFPEPVTVSWNS |
| | | GALTSGVHTFPAVLQSSGLYSLSSVVTVPSSNFGTQTYTCNVD |
| | | HKPSNTKVDKTVERKCCVECPPCPAPEAEGAKSVFLFPPKPKD |
| | | TLMISRTPEVTCVVVDVSHEDPEVKFNWYVDGVEVHNAKTKPR |
| | | EEQYNSTYRVVSVLTVLHQDWLNGKEYKCKVSNKALPAPIEKT |
| | | ISKAKGQPREPQVYTLPPSREEMTKNQVSLTCLVKGFYPSDIA |
| | | VEWESNGQPENNYKTTPPVLDSDGSFFLYSKLTVDKSRWQQGN |
| | | VFSCSVMHEALHNHYTQKSLSLSPGK |
| 261 | IgG2.5G1-L235E-P238K | ASTKGPSVFPLAPSSRSTSESTAALGCLVKDYFPEPVTVSWNS |
| | | GALTSGVHTFPAVLQSSGLYSLSSVVTVPSSNFGTQTYTCNVD |
| | | HKPSNTKVDKTVERKCCVECPPCPAPELEGGKSVFLFPPKPKD |
| | | TLMISRTPEVTCVVVDVSHEDPEVKFNWYVDGVEVHNAKTKPR |
| | | EEQYNSTYRVVSVLTVLHQDWLNGKEYKCKVSNKALPAPIEKT |
| | | ISKAKGQPREPQVYTLPPSREEMTKNQVSLTCLVKGFYPSDIA |
| | | VEWESNGQPENNYKTTPPVLDSDGSFFLYSKLTVDKSRWQQGN |
| | | VFSCSVMHEALHNHYTQKSLSLSPGK |
| 262 | IgG2.5G1-L235E-P238K-K322A | ASTKGPSVFPLAPSSRSTSESTAALGCLVKDYFPEPVTVSWNS |
| | | GALTSGVHTFPAVLQSSGLYSLSSVVTVPSSNFGTQTYTCNVD |
| | | HKPSNTKVDKTVERKCCVECPPCPAPELEGGKSVFLFPPKPKD |
| | | TLMISRTPEVTCVVVDVSHEDPEVKFNWYVDGVEVHNAKTKPR |
| | | EEQYNSTYRVVSVLTVLHQDWLNGKEYKCAVSNKALPAPIEKT |
| | | ISKAKGQPREPQVYTLPPSREEMTKNQVSLTCLVKGFYPSDIA |
| | | VEWESNGQPENNYKTTPPVLDSDGSFFLYSKLTVDKSRWQQGN |
| | | VFSCSVMHEALHNHYTQKSLSLSPGK |
| 263 | 3h56-269-IgG4.1 | EVQLLESGGGLVQPGGSLRLSCAASGFTFRDYEMWWVRQAPGK |
| | OR | GLERVSAINPQGTRTYYADSVKGRFTISRDNSKNTLYLQMNSL |
| | BMS-986090 | RAEDTAVYYCAKLPFRFSDRGQGTLVTVSSASTESKYGPPCPP |
| | | CPAPEFLGGPSVFLFPPKPKDTLMISRTPEVTCVVVDVSQEDP |
| | | EVQFNWYVDGVEVHNAKTKPREEQFNSTYRVVSVLTVLHQDWL |
| | | NGKEYKCKVSNKGLPSSIEKTISKAKGQPREPQVYTLPPSQEE |
| | | MTKNQVSLTCLVKGFYPSDIAVEWESNGQPENNYKTTPPVLDS |
| | | DGSFFLYSRLTVDKSRWQEGNVFSCSVMHEALHNHYTQKSLSL |
| | | SLGK |
| 264 | 3h56-269-CT | EVQLLESGGGLVQPGGSLRLSCAASGFTFRDYEMWWVRQAPGK |
| | | GLERVSAINPQGTRTYYADSVKGRFTISRDNSKNTLYLQMNSL |
| | | RAEDTAVYYCAKLPFRFSDRGQGTLVTVSSASTEPKSSDKTHT |
| | | SPPSPAPELLGGSSVFLFPPKPKDTLMISRTPEVTCVVVDVSH |
| | | EDPEVKFNWYVDGVEVHNAKTKPREEQYNSTYRVVSVLTVLHQ |
| | | DWLNGKEYKCKVSNKALPAPIEKTISKAKGQPREPQVYTLPPS |
| | | RDELTKNQVSLTCLVKGFYPSDIAVEWESNGQPENNYKTTPPV |
| | | LDSDGSFFLYSKLTVDKSRWQQGNVFSCSVMHEALHNHYTQKS |
| | | LSLSPGK |
| 265 | 3h56-269-IgG1.1f | EVQLLESGGGLVQPGGSLRLSCAASGFTFRDYEMWWVRQAPGK |
| | | GLERVSAINPQGTRTYYADSVKGRFTISRDNSKNTLYLQMNSL |
| | | RAEDTAVYYCAKLPFRFSDRGQGTLVTVSSASTEPKSCDKTHT |
| | | CPPCPAPEAEGAPSVFLFPPKPKDTLMISRTPEVTCVVVDVSH |
| | | EDPEVKFNWYVDGVEVHNAKTKPREEQYNSTYRVVSVLTVLHQ |
| | | DWLNGKEYKCKVSNKALPSSIEKTISKAKGQPREPQVYTLPPS |
| | | REEMTKNQVSLTCLVKGFYPSDIAVEWESNGQPENNYKTTPPV |
| | | LDSDGSFFLYSKLTVDKSRWQQGNVFSCSVMHEALHNHYTQKS |
| | | LSLSPGK |
| 266 | 3h56-269-IgG1.3f | EVQLLESGGGLVQPGGSLRLSCAASGFTFRDYEMWWVRQAPGK |
| | | GLERVSAINPQGTRTYYADSVKGRFTISRDNSKNTLYLQMNSL |
| | | RAEDTAVYYCAKLPFRFSDRGQGTLVTVSSASTEPKSCDKTHT |
| | | CPPCPAPEAEGAPSVFLFPPKPKDTLMISRTPEVTCVVVDVSH |
| | | EDPEVKFNWYVDGVEVHNAKTKPREEQYNSTYRVVSVLTVLHQ |
| | | DWLNGKEYKCKVSNKALPAPIEKTISKAKGQPREPQVYTLPPS |
| | | REEMTKNQVSLTCLVKGFYPSDIAVEWESNGQPENNYKTTPPV |
| | | LDSDGSFFLYSKLTVDKSRWQQGNVFSCSVMHEALHNHYTQKS |
| | | LSLSPGK |
| 267 | 3h56-269-IgG1-D265A | EVQLLESGGGLVQPGGSLRLSCAASGFTFRDYEMWWVRQAPGK |
| | | GLERVSAINPQGTRTYYADSVKGRFTISRDNSKNTLYLQMNSL |
| | | RAEDTAVYYCAKLPFRFSDRGQGTLVTVSSASTEPKSCDKTHT |
| | | CPPCPAPELLGGPSVFLFPPKPKDTLMISRTPEVTCVVVAVSH |
| | | EDPEVKFNWYVDGVEVHNAKTKPREEQYNSTYRVVSVLTVLHQ |
| | | DWLNGKEYKCKVSNKALPAPIEKTISKAKGQPREPQVYTLPPS |
| | | REEMTKNQVSLTCLVKGFYPSDIAVEWESNGQPENNYKTTPPV |
| | | LDSDGSFFLYSKLTVDKSRWQQGNVFSCSVMHEALHNHYTQKS |
| | | LSLSPGK |
| 268 | 1F4 Heavy chain variable | EVQLLESGGGLVQPGGSLRLSCAASGFTFSIYAMSWVRQAPGK |
| | region and CH1 | GLEWVSAISDSGGRTYFADSVRGRFTISRDNSKNTLSLQMNSL |
| | | RAEDTAVYYCAKVDYSNYLFFDYWGQGTLVTVSSASTKGPSVF |
| | | PLAPSSKSTSGGTAALGCLVKDYFPEPVTVSWNSGALTSGVHT |
| | | FPAVLQSSGLYSLSSVVTVPSSSLGTQTYICNVNHKPSNTKVD |
| | | KRV |
| 269 | 1F4 Light chain variable | EIVLTQSPGTLSLSPGERATLSCRASQSISSSYLAWYQQKPGQ |
| | region and CL | APRLLIYGASSRATGIPDRFSGSGSGTDFTLTISRLEPEDFAV |
| | | YYCQQYGSSPYTFGQGTKLEIKRTVAAPSVFIFPPSDEQLKSG |
| | | TASVVCLLNNFYPREAKVQWKVDNALQSGNSQESVTEQDSKDS |
| | | TYSLSSTLTLSKADYEKHKVYACEVTHQGLSSPVTKSFNRGEC |
| 270 | 1F4-IgG1f heavy chain | EVQLLESGGGLVQPGGSLRLSCAASGFTFSIYAMSWVRQAPGK |
| | | GLEWVSAISDSGGRTYFADSVRGRFTISRDNSKNTLSLQMNSL |
| | | RAEDTAVYYCAKVDYSNYLFFDYWGQGTLVTVSSASTKGPSVF |
| | | PLAPSSKSTSGGTAALGCLVKDYFPEPVTVSWNSGALTSGVHT |
| | | FPAVLQSSGLYSLSSVVTVPSSSLGTQTYICNVNHKPSNTKVD |
| | | KRVEPKSCDKTHTCPPCPAPELLGGPSVFLFPPKPKDTLMISR |
| | | TPEVTCVVVDVSHEDPEVKFNWYVDGVEVHNAKTKPREEQYNS |
| | | TYRVVSVLTVLHQDWLNGKEYKCKVSNKALPAPIEKTISKAKG |
| | | QPREPQVYTLPPSREEMTKNQVSLTCLVKGFYPSDIAVEWESN |
| | | GQPENNYKTTPPVLDSDGSFFLYSKLTVDKSRWQQGNVFSCSV |
| | | MHEALHNHYTQKSLSLSPGK |
| 271 | 1F4-IgG4.1 heavy chain | EVQLLESGGGLVQPGGSLRLSCAASGFTFSIYAMSWVRQAPGK |
| | | GLEWVSAISDSGGRTYFADSVRGRFTISRDNSKNTLSLQMNSL |
| | | RAEDTAVYYCAKVDYSNYLFFDYWGQGTLVTVSSASTKGPSVF |
| | | PLAPCSRSTSESTAALGCLVKDYFPEPVTVSWNSGALTSGVHT |
| | | FPAVLQSSGLYSLSSVVTVPSSSLGTKTYTCNVDHKPSNTKVD |
| | | KRVESKYGPPCPPCPAPEFLGGPSVFLFPPKPKDTLMISRTPE |
| | | VTCVVVDVSQEDPEVQFNWYVDGVEVHNAKTKPREEQFNSTYR |
| | | VVSVLTVLHQDWLNGKEYKCKVSNKGLPSSIEKTISKAKGQPR |
| | | EPQVYTLPPSQEEMTKNQVSLTCLVKGFYPSDIAVEWESNGQP |
| | | ENNYKTTPPVLDSDGSFFLYSRLTVDKSRWQEGNVFSCSVMHE |
| | | ALHNHYTQKSLSLSLG |
| 272 | 1F4-IgG1.1f heavy chain | EVQLLESGGGLVQPGGSLRLSCAASGFTFSIYAMSWVRQAPGK |
| | | GLEWVSAISDSGGRTYFADSVRGRFTISRDNSKNTLSLQMNSL |
| | | RAEDTAVYYCAKVDYSNYLFFDYWGQGTLVTVSSASTKGPSVF |
| | | PLAPSSKSTSGGTAALGCLVKDYFPEPVTVSWNSGALTSGVHT |
| | | FPAVLQSSGLYSLSSVVTVPSSSLGTQTYICNVNHKPSNTKVD |
| | | KRVEPKSCDKTHTCPPCPAPEAEGAPSVFLFPPKPKDTLMISR |
| | | TPEVTCVVVDVSHEDPEVKFNWYVDGVEVHNAKTKPREEQYNS |
| | | TYRVVSVLTVLHQDWLNGKEYKCKVSNKALPSSIEKTISKAKG |
| | | QPREPQVYTLPPSREEMTKNQVSLTCLVKGFYPSDIAVEWESN |
| | | GQPENNYKTTPPVLDSDGSFFLYSKLTVDKSRWQQGNVFSCSV |
| | | MHEALHNHYTQKSLSLSPG |
| 273 | 1F4-IgG1.3f heavy chain | EVQLLESGGGLVQPGGSLRLSCAASGFTFSIYAMSWVRQAPGK |
| | | GLEWVSAISDSGGRTYFADSVRGRFTISRDNSKNTLSLQMNSL |
| | | RAEDTAVYYCAKVDYSNYLFFDYWGQGTLVTVSSASTKGPSVF |
| | | PLAPSSKSTSGGTAALGCLVKDYFPEPVTVSWNSGALTSGVHT |
| | | FPAVLQSSGLYSLSSVVTVPSSSLGTQTYICNVNHKPSNTKVD |
| | | KRVEPKSCDKTHTCPPCPAPEAEGAPSVFLFPPKPKDTLMISR |
| | | TPEVTCVVVDVSHEDPEVKFNWYVDGVEVHNAKTKPREEQYNS |
| | | TYRVVSVLTVLHQDWLNGKEYKCKVSNKALPAPIEKTISKAKG |
| | | QPREPQVYTLPPSREEMTKNQVSLTCLVKGFYPSDIAVEWESN |
| | | GQPENNYKTTPPVLDSDGSFFLYSKLTVDKSRWQQGNVFSCSV |
| | | MHEALHNHYTQKSLSLSPG |
| 274 | 1F4-D265A heavy chain | EVQLLESGGGLVQPGGSLRLSCAASGFTFSIYAMSWVRQAGKG |
| | | LEWVSAISDSGGRTYFADSVRGRFTISRDNSKNTLSLQMNSLR |
| | | AEDTAVYYCAKVDYSNYLFFDYWGQGTLVTVSSASTKGPSVFP |
| | | LAPSSKSTSGGTAALGCLVKDYFPEPVTVSWNSGALTSGVHTF |
| | | PAVLQSSGLYSLSSVVTVPSSSLGTQTYICNVNHKPSNTKVDK |
| | | RVEPKSCDKTHTCPPCPAPELLGGPSVFLFPPKPKDTLMISRT |
| | | PEVTCVVVAVSHEDPEVKFNWYVDGVEVHNAKTKPREEQYNST |
| | | YRVVSVLTVLHQDWLNGKEYKCKVSNKALPAPIEKTISKAKGQ |
| | | PREPQVYTLPPSREEMTKNQVSLTCLVKGFYPSDIVEWESNGQ |
| | | PENNYKTTPPVLDSDGSFFLYSKLTVDKSRWQQGNVFSCSVMH |
| | | EALHNHYTQKSLSLSPGK |
| 275 | 1F4-CT heavy chain | EVQLLESGGGLVQPGGSLRLSCAASGFTFSIYAMSWVRQAPGK |
| | | GLEWVSAISDSGGRTYFADSVRGRFTISRDNSKNTLSLQMNSL |
| | | RAEDTAVYYCAKVDYSNYLFFDYWGQGTLVTVSSASTKGPSVF |
| | | PLAPSSKSTSGGTAALGCLVKDYFPEPVTVSWNSGALTSGVHT |
| | | FPAVLQSSGLYSLSSVVTVPSSSLGTQTYICNVNHKPSNTKVD |
| | | KRVEPKSCDKTHTSPPSPAPELLGGSSVFLFPPKPKDTLMISR |
| | | TPEVTCVVVDVSHEDPEVKFNWYVDGVEVHNAKTKPREEQYNS |
| | | TYRVVSVLTVLHQDWLNGKEYKCKVSNKALPAPIEKTISKAKG |
| | | QPREPQVYTLPPSRDELTKNQVSLTCLVKGFYPSDIAVEWESN |
| | | GQPENNYKTTPPVLDSDGSFFLYSKLTVDKSRWQQGNVFSCSV |
| | | MHEALHNHYTQKSLSLSPGK |

[0478] Those skilled in the art will recognize or be able to ascertain, using no more than routine experimentation, many equivalents of the specific embodiments described herein described herein. Such equivalents are intended to be encompassed by the following claims.

We claim:

1. An antibody comprising a modified heavy chain constant region, wherein the modified heavy chain constant region comprises a CH1 domain, a hinge, a CH2 domain, and a CH3 domain in order from N- to C-terminus, wherein the hinge is of an IgG2 isotype and at least one of the CH1, CH2, or CH3 domains is not of an IgG2 isotype.

2. The antibody of claim 1, wherein the hinge is a wildtype human IgG2 hinge, or comprises an amino acid sequence that is at least 95% identical to the amino acid sequence of a wildtype human IgG2 hinge.

3. The antibody of claim 1 or 2, wherein the hinge contains one or more modifications that reduces disulfide bond formation.

4. The antibody of any one of the preceding claims, wherein the hinge comprises the amino acid substitution C219S.

5. The antibody of any one of the preceding claims, wherein the hinge comprises the amino acid sequence of any one of SEQ ID NO: 8, 21-23, 126-132 or 134-147 or a sequence that comprises 1-3 amino acids inserted between CVE and CPP.

6. The antibody of any one of the preceding claims, wherein the CH1 domain is an IgG2 CH1 domain.

7. The antibody of any one of the preceding claims, wherein the CH1 domain is a wildtype human IgG2 CH1 domain, or comprises an amino acid sequence that is at least 95% identical to the amino acid sequence of a wildtype human IgG2 CH1 domain.

8. The antibody of any one of the preceding claims, wherein the IgG2 CH1 domain comprises the amino acid sequence
(SEQ ID NO: 7)
ASTKGPSVFPLAPCSRSTSESTAALGCLVKDYFPEPVTVSWNSGALTSGV
HTFPAVLQSSGLYSLSSVVTVPSSNFGTQTYTCNVDHKPSNTKVDKTV.

9. The antibody of any one of the preceding claims, wherein the CH2 domain is an IgG1 CH2 domain.

10. The antibody of any one of the preceding claims, wherein the CH2 domain is a wildtype human IgG1 CH2 domain, or comprises an amino acid sequence that is at least 95% identical to the amino acid sequence of a wildtype human IgG1 CH2 domain.

11. The antibody of any one of the preceding claims, wherein the CH2 domain comprises one or more modifications which reduces or eliminates effector functions.

12. The antibody of any one of the preceding claims, wherein the CH2 domain comprises amino acid substitutions A330S and P331S.

13. The antibody of any one of the preceding claims, wherein the CH2 domain comprises the amino acid sequence
(SEQ ID NO: 4)
PSVFLFPPKPKDTLMISRTPEVTCVVVDVSHEDPEVKFNWYVDGVEVHNA
KTKPREEQYNSTYRVVSVLTVLHQDWLNGKEYKCKVSNKALPAPIEKTIS
KAK.

14. The antibody of any one of the preceding claims, wherein the CH3 domain is an IgG1 CH3 domain.

15. The antibody of any one of the preceding claims, wherein the CH3 domain is a wildtype human IgG1 CH3 domain, or comprises an amino acid sequence that is at least 95% identical to the amino acid sequence of a wildtype human IgG1 CH3 domain.

16. The antibody of any one of the preceding claims, wherein the CH3 domain comprises the amino acid sequence
(SEQ ID NO: 5)
GQPREPQVYTLPPSREEMTKNQVSLTCLVKGFYPSDIAVEWESNGQPENN
YKTTPPVLDSDGSFFLYSKLTVDKSRWQQGNVFSCSVMHEALHNHYTQKS
LSLSPGK.

17. The antibody of any one of the preceding claims, wherein the CH3 domain comprises amino acid substitutions E356D and M358L.

18. The antibody of any one of claims 1-17, which has at least one enhanced property or a new introduced property relative to the same antibody that comprises an IgG1 hinge and CH1 domain.

19. The antibody of claim 18, wherein the antibody has at least one enhanced property selected from agonist activity, antibody mediated receptor internalization, ADCC, receptor mediated signaling, antagonist activity, immuno-modulating activity and anti-tumor activity; or a newly introduced property, which is agonist activity.

20. An antibody comprising a modified heavy chain constant region comprising a CH1 domain, a hinge, a CH2 domain, and a CH3 domain in order from N- to C-terminus, and wherein
(a) the CH1 domain comprises the amino acid sequence of SEQ ID NO: 7 or an amino acid sequence that differs therefrom in at most 5 amino acids or which is at least 95% identical to SEQ ID NO: 7, and wherein at least one of C131, R133, E137, S138 or R217 are not substituted or deleted;
(b) a hinge comprising any one of SEQ ID NO: 8, 21-23, 126-132 or 134-147 or a sequence that comprises 1-3 amino acids inserted between CVE and CPP, or which differs therefrom in at most 5 amino acids, wherein the hinge does not comprise a substitution or deletion at both C219 and C220;
(c) the antibody has at least one enhanced property or a new introduced property relative to the same antibody that comprises an IgG1 hinge and CH1 domain; and
(d) the modified heavy chain constant region is not a wildtype IgG2 constant region or an IgG2 constant region comprising C219S and/or C220S.

21. The antibody of claim 20, wherein the hinge comprises the amino acid sequence ERKXCVECPPCPAP (SEQ ID NO: 129) or ERKCXVECPPCPAP (SEQ ID NO: 130), wherein X is any amino acid except cysteine.

22. The antibody of claim 21, wherein the hinge comprises the amino acid sequence ERKSCVECPPCPAP (SEQ ID NO: 131) or ERKCSVECPPCPAP (SEQ ID NO: 132).

23. The antibody of any one of claims 20-22, wherein at least one of P233, V234, A235 or G237 is deleted or substituted with another amino acid residue.

24. The antibody of claim 23, wherein P233, V234, A235 and G237 are deleted or substituted with another amino acid residue.

25. The antibody of any one of claims 20-24, wherein none of amino acid residues R133, E137, S138 and R217 are substituted or deleted.

26. The antibody of claim 24, wherein none of amino acid residues C131, R133, E137, S138 and R217 are substituted or deleted.

27. The antibody of any one of claims 20-26, wherein N192 is substituted with another amino acid.

28. The antibody of any one of claims 20-27, wherein F193 is substituted with another amino acid

29. The antibody of any one of claims 20-28, wherein the antibody comprises a CH2 domain that is at least 95% identical to that of wildtype IgG1.

30. The antibody of any one of claims 20-29, wherein the antibody comprises a CH3 domain that is at least 95% identical to that of wildtype IgG1.

31. The antibody of any one of claims 28-30, wherein the CH2 and/or CH3 domain is not a wildtype IgG1 CH2 and/or CH3 domain, and wherein the antibody has an effector function that is more potent than that of wildtype IgG1.

32. The antibody of any one of claims 28-30, wherein the CH2 and/or CH3 domain is not a wildtype IgG1 CH2 and/or CH3 domain, and wherein the antibody has an effector function that less potent than that of wildtype IgG1.

33. The antibody of any one of claims 20-32, wherein the antibody comprises a CH2 domain that is at least 95% identical to that of wildtype IgG4.

34. The antibody of any one of claims 20-33, wherein the antibody comprises a CH3 domain that is at least 95% identical to that of wildtype IgG4.

35. The antibody of any one of claims 20-34, wherein the antibody has at least one enhanced property selected from agonist activity, antibody mediated receptor internalization, ADCC, receptor mediated signaling, antagonist activity, immuno-modulating activity or anti-tumor activity; or a newly introduced property, which is agonist activity.

36. The antibody of claim 35, wherein
(a) the CH1 domain is a wildtype human IgG2 CH1 domain;
(b) the hinge comprises SEQ ID NO: any one of SEQ ID NO: 8, 21-23, 126-132 or 134-147 or a sequence that comprises 1-3 amino acids inserted between CVE and CPP;
(c) the CH2 domain is a wildtype human IgG1 CH2 domain or a modified CH2 domain conferring enhanced or reduced effector function to the antibody; and
(d) the CH3 domain is a wildtype human IgG1 CH3 domain or a modified CH3 domain conferring enhanced or reduced effector function to the antibody.

37. The antibody of any one of the preceding claims, comprising the amino acid sequence set forth in any one of SEQ ID NOs: 26-37, 54-56, 78-125, 152-232, 234-245 and 247-262 or an amino acid sequence that is at least 95% identical to SEQ ID NOs: 26-37, 54-56, 78-125, 152-232, 234-245 and 247-262.

38. An antibody comprising a modified heavy chain constant region, wherein the heavy chain constant region comprises a CH1 domain and a hinge comprising the sequence
(SEQ ID NO: 133)
ASTKGPSVFPLAPCSRSTSESTAALGCLVKDYFPEPVTVSWNSGALTSGV
HTFPAVLQSSGLYSLSSVVTVPSSNFGTQTYTCNVDHKPSNTKVDKTVER
KCCVECPPCPAPPVAG,
or an amino acid sequence that differs from SEQ ID NO: 133 in at most 10 amino acids or is at least 90% identical to SEQ ID NO: 133, wherein
at least one of C131, R133, E137, S138 and R217 is not substituted with another amino acid or deleted;
C219 and C220 may be substituted with another amino acid or deleted, but C219 and C220 may not both be substituted or deleted;
1-3 amino acids may be inserted between CVE and CPP in the hinge;
the hinge optionally comprises an additional amino acid at the C-terminus, e.g., G;
one or more of amino acids P233, V234, A235 and G237 may be substituted with another amino acid (e.g., the corresponding amino acid from IgG1) or deleted;
the CH2 and CH3 domains may be wildtype or modified IgG1, IgG2, IgG3 or IgG4 CH2 and CH3 domains;
the modified heavy chain constant region is not a wildtype IgG2 heavy chain constant region or a wildtype IgG2 heavy constant domain with C219S or C220S; and
the antibody has at least one enhanced property or a new introduced property relative to the same antibody that comprises an IgG1 hinge and CH1 domain.

39. The antibody of claim 38, wherein the antibody has at least one enhanced property selected from agonist activity, antibody mediated receptor internalization, ADCC, receptor mediated signaling, antagonist activity, immuno-modulating activity or anti-tumor activity; or a newly introduced property, which is agonist activity.

40. The antibody of claim 38 or 39, wherein none of amino acids C131; R133; E137; S138; R217 are substituted with another amino acid or deleted.

41. The antibody of any one of claims 38-40, wherein N192 and/or F193 are not substituted or are N192S and/or F193L, respectively.

42. The antibody of any one of claims 38-41, wherein C219 is C219S.

43. The antibody of any one of claims 38-41, wherein C220 is C220S.

44. The antibody of any one of claims 38-43, wherein P233-G237 are substituted or deleted.

45. The antibody of any one of claims 38-43, wherein V234-G237 are substituted or deleted.

46. The antibody of any one of claims 38-43, wherein A235-G237 are substituted or deleted.

47. The antibody of any one of claims 38-43, wherein G237 is substituted or deleted.

48. The antibody of any one of claims 38-43, wherein P233 is substituted or deleted.

49. The antibody of any one of claims 38-43, wherein P233-V234 are substituted or deleted.

50. The antibody of any one of claims 38-43, wherein P233-A235 are substituted or deleted.

51. The antibody of any of claims 38-50, wherein the antibody has effector function.

52. The antibody of any of claims 38-50, wherein the antibody does not have effector function.

53. The antibody of any one of claims 38-52, wherein the antibody comprises a wildtype or modified IgG1 CH2 domain.

54. The antibody of any one of claims 38-52, wherein the antibody comprises a wildtype or modified IgG1 CH3 domain.

55. An antibody comprising a modified heavy chain constant region, wherein the heavy chain constant region comprises a CH1 domain comprising the sequence ASTKGPSVFPLAPCSRSTSESTAALGCLVKDYFPEPVTVSWNSGALTSGVHTFPAVLQS S GLYSLSSVVTVPSSNFGTQTYTCNVDHKPSNTKVDKTVE (SEQ ID NO: 7), or an amino acid sequence that differs from SEQ ID NO: 7 in at most 10 amino acids or is at least 90% identical to SEQ ID NO: 7, wherein
at least one of C131, R133, E137, S138 and R217 is not substituted or deleted;
the modified heavy chain constant region is not a wildtype IgG2 heavy chain constant region or a wildtype IgG2 heavy constant domain with C219S or C220S; and
the antibody has at least one enhanced property or a new introduced property relative to the same antibody that comprises an IgG1 hinge and CH1 domain.

56. The antibody of claim 55, wherein the antibody has at least one enhanced property selected from agonist activity, antibody mediated receptor internalization, ADCC, receptor mediated signaling, antagonist activity, immuno-modulating activity or anti-tumor activity; or a newly introduced property, which is agonist activity.

57. The antibody of claim 55 or 56, wherein none of amino acids C131; R133; E137 and S138 are substituted with another amino acid or deleted.

58. The antibody of any one of claims 55-57, wherein N192 and/or F193 are not substituted or are N192S and/or F193L, respectively.

59. The antibody of any one of claims 55-58, wherein the antibody has effector function.

60. The antibody of any one of claims 55-58, wherein the antibody does not have effector function.

61. The antibody of any one of claims 55-60, wherein the antibody comprises a wildtype or modified IgG1 CH2 domain.

62. The antibody of any one of claims 55-61, wherein the antibody comprises a wildtype or modified IgG1 CH3 domain.

63. An antibody comprising a modified heavy chain constant region, wherein the heavy chain constant region comprises a hinge comprising the sequence
(SEQ ID NO: 8)
ERKCCVECPPCPAPPVAG,
or an amino acid sequence that differs from SEQ ID NO: 8 in at most 5 amino acids, wherein
C219 and C220 may be substituted with another amino acid or deleted, but C219 and C220 may not both be substituted or deleted;
one or more of amino acids P233, V234, A235 and G237 may be substituted or deleted;
1-3 amino acids may be inserted between CVE and CPP in the hinge;
the hinge optionally comprises an additional amino acid at the C-terminus, e.g., G;
the CH2 and CH3 domains may be wildtype or modified IgG1, IgG2, IgG3 or IgG4 CH2 and CH3 domains;
the modified heavy chain constant region is not a wildtype IgG2 heavy chain constant region or a wildtype IgG2 heavy constant domain with C219S or C220S; and
the antibody has at least one enhanced property or a new introduced property relative to the same antibody that comprises an IgG1 hinge and CH1 domain.

64. The antibody of claim 63, wherein the antibody has at least one enhanced property selected from agonist activity, antibody mediated receptor internalization, ADCC, receptor mediated signaling, antagonist activity, immuno-modulating activity or anti-tumor activity; or a newly introduced property, which is agonist activity.

65. The antibody of any one of claims 63-64, wherein C219 is C219S.

66. The antibody of any one of claims 63-64, wherein C220 is C220S.

67. The antibody of any one of claims 63-66, wherein P233-G237 are mutated or deleted.

68. The antibody of any one of claims 63-66, wherein V234-G237 mutated or are deleted.

69. The antibody of any one of claims 63-66, wherein A235-G237 mutated or are deleted.

70. The antibody of any one of claims 63-66, wherein G237 mutated or is deleted.

71. The antibody of any one of claims 63-66, wherein P233 mutated or is deleted.

72. The antibody of any one of claims 63-66, wherein P233-V234 mutated or are deleted.

73. The antibody of any one of claims 63-66, wherein P233-A235 mutated or are deleted.

74. The antibody of any one of claims 63-73, wherein the antibody has effector function.

75. The antibody of any one of claims 63-73, wherein the antibody does not have effector function.

76. The antibody of any one of claims 63-75, wherein the antibody comprises a wildtype or modified IgG1 CH2 domain.

77. The antibody of any one of claims 63-76, wherein the antibody comprises a wildtype or modified IgG1 CH3 domain.

78. An antibody comprising a modified heavy chain constant region, wherein the heavy chain constant region comprises an IgG1 or IgG2 hinge, and wherein the hinge is lacking 1-7 amino acids, and wherein the antibody has at least one enhanced property or a new introduced property relative to the same antibody that comprises an IgG1 hinge and CH1 domain.

79. The antibody of claim 78, wherein the antibody has at least one enhanced property selected from agonist activity, antibody mediated receptor internalization, ADCC, receptor mediated signaling, antagonist activity, immuno-modulating activity or anti-tumor activity; or a newly introduced property, which is agonist activity.

80. The antibody of claim 78 or 79, wherein the hinge is an IgG2 hinge that is lacking 1-4 amino acids.

81. The antibody of claim 80, wherein the IgG2 hinge is lacking amino acids C219, C220, V222 and E224.

82. The antibody of claim 78 or 79, wherein the hinge is an IgG1 hinge that is lacking amino acids S219, C220, D221, K222, T223, H224 and T225.

83. The antibody of anyone of claims 78-82, wherein the antibody comprises an IgG2 CH1 domain that is wildtype or modified.

84. The antibody of anyone of claims 78-82, wherein the antibody comprises an IgG1 CH1 domain that is wildtype or modified.

85. The antibody of anyone of claims 78-84, wherein the antibody comprises an IgG2 CH2 domain.

86. The antibody of anyone of claims 78-84, wherein the antibody comprises an IgG1 CH2 domain.

87. The antibody of anyone of claims 78-86, wherein the antibody comprises an IgG2 CH3 domain.

88. The antibody of anyone of claims 78-86, wherein the antibody comprises an IgG1 CH3 domain.

89. The antibody of any one of the preceding claims, which is a human or humanized antibody, or antigen binding portion thereof.

90. The antibody of any one of of the preceding claims, wherein the antibody binds specifically to an antigen that is involved in immune regulation.

91. The antibody of claim 90, wherein the antibody is an agonist of a costimulatory receptor or an antagonist of an inhibitory receptor.

92. The antibody of claim 91, wherein the costimulatory receptor is selected from the group of B7-1, B7-2, CD28, 4-1BB, GITR, OX40, ICOS, CD70, CD27, CD40, DR3 or CD28H.

93. The antibody of claim 91, wherein the inhibitory receptor is selected from the group of CTLA-4, PD-1, PD-L1, PD-L2, LAG-3, TIM-3, Galectin 9, CEACAM-1, BTLA, CD69, Galectin-1, TIGIT, CD113, GPR56, VISTA, 2B4, CD48, GARP, PD1H, LAIR1, TIM-1 and TIM-4.

94. The antibody of claim 90, wherein the antigen is CD73 or CD39.

95. An antibody that binds specifically to a costimulatory receptor and comprises a modified heavy chain constant region selected from the group of SEQ ID NOs: 26-37, 54-56, 78-125, 152-232, 234-245 and 247-262.

96. The antibody of claim 95, wherein the costimulatory receptor is GITR, OX40, 4-1BB, CD28, ICOS, CD40L, CD27 or any other TNFR superfamily member.

97. The antibody of claim 95 or 96, wherein the antibody exhibits enhanced or altered agonist activity relative to an antibody having the same variable regions and light chain, but comprising an IgG1 heavy chain constant region.

98. An antibody that binds specifically to a cell surface molecule and triggers antibody mediated internalization of the cell surface molecule, and comprises a modified heavy chain constant region selected from the group of SEQ ID NOs: 26-37, 54-56, 78-125, 152-232, 234-245 and 247-262.

99. The antibody of claim 98, wherein the cell surface molecule is CD73.

100. The antibody of claim 98 or 99, wherein the antibody possesses enhanced or altered internalization properties relative to an antibody having the same variable regions and light chain, but comprising an IgG1 heavy chain constant region.

101. An antibody that binds specifically to an inhibitory receptor and comprises a modified heavy chain constant region selected from the group of SEQ ID NOs: 26-37, 54-56, 78-125, 152-232, 234-245 and 247-262.

102. The antibody of claim 101, wherein the inhibitory receptor is CTLA-4, PD-1, LAG-3, TIM-3, Galectin 9, CEACAM-1, BTLA, CD69, Galectin-1, TIGIT, CD113, GPR56, VISTA, 2B4, CD48, GARP, PD1H, LAIR1, TIM-1 and TIM-4.

103. The antibody of claim 101 or 102, wherein the antibody exhibits more potent or altered antagonist activity or introduces a new activity relative to the same antibody having an IgG1 heavy chain constant region.

104. An antibody that binds specifically to a cell surface molecule and triggers intracellular signaling, wherein the antibody comprises a modified heavy chain constant region selected from the group of SEQ ID NOs 26-37, 54-56, 78-125, 152-232, 234-245 and 247-262.

105. The antibody of claim 104, wherein the intracellular signaling mediates agonist activity, antagonist activity, internalization of the cell surface molecule, or ADCC.

106. The antibody of claim 104 or 105, wherein the antibody triggers more potent intracellular signaling relative to to an antibody having the same variable regions and light chain, but comprising an IgG1 heavy chain constant region.

107. An antibody that binds specifically to a cell surface molecule and triggers formation of high molecular weight antibody-cell surface molecule complexes, wherein the antibody comprises a modified heavy chain constant region selected from the group of SEQ ID NOs: 26-37, 54-56, 78-125, 152-232, 234-245 and 247-262.

108. The antibody of claim 107, wherein the antibody triggers formation of higher molecular weight complexes relative to an antibody having the same variable regions and light chain, but comprising an IgG1 heavy chain constant region.

109. An antibody that binds specifically to a cell surface molecule and triggers clustering or oligomerization of the cell surface molecule, wherein the antibody comprises a modified heavy chain constant region selected from the group of SEQ ID NOs: 26-37, 54-56, 78-125, 152-232, 234-245 and 247-262.

110. The antibody of claim 109, wherein the antibody triggers more clustering or oligomerization of the cell surface molecule relative to an antibody having the same variable regions and light chain, but comprising an IgG1 heavy chain constant region.

111. A bispecific molecule comprising the antibody of any one of the preceding claims, linked to a molecule having a second binding specificity.

112. An immunoconjugate comprising the antibody of any one of the preceding claims, linked to a second agent.

113. A composition comprising the antibody, bispecific or immunoconjugate, of any one of claims 1-112, and a carrier.

114. The composition of claim 44, further comprising one or more additional therapeutic agents.

115. The composition of claim 45, wherein the additional therapeutic agent stimulates the immune system.

116. The composition of claim 46, wherein the therapeutic agent is an antagonist of a checkpoint inhibitor or a co-stimulatory receptor.

117. A method of preparing an antibody comprising a modified heavy chain constant region, wherein the antibody comprises a CH1 domain, a hinge, a CH2 domain, and a CH3 domain in order from N- to C-terminus, comprising the steps of:
(a) providing an antibody comprising a hinge and/or a CH1 domain that is not an IgG2 hinge and/or IgG2 CH1 domain;
(b) replacing the hinge and/or the CH1 domain with an IgG2 hinge and/or IgG2 CH1 domain, respectively.

118. A method of increasing internalization of an antibody by a cell, comprising:
(a) providing an antibody comprising a hinge and/or a CH1 domain that is not an IgG2 hinge and/or IgG2 CH1 domain;
(b) replacing the hinge and/or the CH1 domain with an IgG2 hinge and/or IgG2 CH1 domain, respectively.

119. The method of claim 118, wherein internalization of the antibody is increased compared to internalization of the same antibody comprising a hinge of a non-IgG2 isotype, e.g., an antibody comprising an IgG1 constant region.

120. A method of increasing the agonist activity of an antibody, comprising:
(a) providing an antibody comprising a hinge and/or a CH1 domain that is not an IgG2 hinge and/or IgG2 CH1 domain;
(b) replacing the hinge and/or the CH1 domain with an IgG2 hinge and/or IgG2 CH1 domain, respectively.

121. The method of claim 120, wherein the agonist activity is increased compared to agonist activity of the same antibody comprising a hinge of a non-IgG2 isotype, e.g., an antibody comprising an IgG1 constant region.

122. The method of any one of claims 117-121, wherein the IgG2 hinge is a wildtype human IgG2 hinge, or comprises an amino acid sequence that is at least 95% identical to the amino acid sequence of a wildtype human IgG2 hinge.

123. The method of any one of claims 117-122, comprising the step of replacing at least one of the CH1, CH2, or CH3 domains with a CH1, CH2, or CH3 domain of a different isotype, respectively.

124. The method of any one of claims 117-123, comprising the steps of (a) replacing the CH1 domain with an IgG2 CH1 domain;
(b) replacing the CH2 domain with an IgG1 CH2 domain; and/or
(c) replacing the CH3 domain with an IgG1 CH3 domain.

125. The method of any one of claims 117-124, comprising the steps of (a) replacing the CH1 domain with a wildtype human IgG2 CH1 domain, or a domain at least 95% identical thereto;
(b) replacing the CH2 domain with a wildtype human IgG1 CH2 domain, or a domain at least 95% identical thereto; and/or
(c) replacing the CH3 domain with a wildtype human IgG1 CH3 domain, or a domain at least 95% identical thereto.

126. The method of any one of claims 117-125, comprising the step of replacing the heavy chain constant region with a heavy chain constant region comprising any one of SEQ ID NOs: 26-37, 54-56, 78-125, 152-232, 234-245 and 247-262 or a region at least 95% identical to SEQ ID NOs: 26-37, 54-56, 78-125, 152-232, 234-245 and 247-262.

127. The method of any one of claims 117-126, wherein the hinge is modified to reduce disulfide bond formation.

128. The method of any one of claims 117-127, wherein the hinge comprises amino acid substitution C219S.

129. The method of claim any one of claims 117-128, wherein the hinge comprises an amino acid sequence set forth in any one of SEQ ID NO: 8, 21-23, 126-132 or 134-147 or a sequence that comprises 1-3 amino acids inserted between CVE and CPP.

130. The method of any one of claims 117-129, wherein the CH1 domain comprises the amino acid sequence
(SEQ ID NO: 7)
ASTKGPSVFPLAPCSRSTSESTAALGCLVKDYFPEPVTVSWNSGALTSGV
HTFPAVLQSSGLYSLSSVVTVPSSNFGTQTYTCNVDHKPSNTKVDKTV.

131. The method of any one of claims 117-130, wherein the CH2 domain is modified to reduce or eliminate effector functions.

132. The method of any one of claims 117-131, wherein the CH2 domain comprises amino acid substitutions A330S and P331S.

133. The method of any one of claims 117-132, wherein the CH2 domain comprises the amino acid sequence
(SEQ ID NO: 4)
PSVFLFPPKPKDTLMISRTPEVTCVVVDVSHEDPEVKFNWYVDGVEVHNA
KTKPREEQYNSTYRVVSVLTVLHQDWLNGKEYKCKVSNKALPAPIEKTIS
KAK.

134. The method of any one of claims 117-133, wherein the CH2 domain comprises amino acid substitutions A330S and P331S.

135. The method of any one of claims 117-134, wherein the CH3 domain comprises the amino acid sequence
(SEQ ID NO: 5)
GQPREPQVYTLPPSREEMTKNQVSLTCLVKGFYPSDIAVEWESNGQPENN
YKTTPPVLDSDGSFFLYSKLTVDKSRWQQGNVFSCSVMHEALHNHYTQKS
LSLSPGK.

136. An antibody, or antigen binding portion thereof, produced by the method of any one of claims 117-135.

137. The antibody, or antigen binding portion thereof, of claim 136, which is a human or humanized antibody.

138. A method of treating a subject, comprising administering the antibody, or antigen binding portion thereof, of any one of the precedint claims.

139. The method of claim 138, further comprising the step of administering one or more additional therapeutic agents.

140. The method of claim 139, wherein the therapeutic agent stimulates the immune system.

141. The method of claim 140, wherein the therapeutic agent is a checkpoint inhibitor or a co-stimulatory molecule.

142. A method of treating a subject, comprising administering the composition, bispecific molecule, or immunoconjugate of any one of the preceding claims.

143. An antibody (or antigen binding fragment thereof) comprising a modified heavy chain constant domain comprising a human IgG heavy chain constant domain, wherein amino acid at position 238 is not P, and the modified heavy chain constant domain has reduced effector function relative to the same IgG heavy chain constant domain, wherein amino acid at position 238 is proline.

144. The antibody of claim 143, wherein the IgG heavy chain constant domain is a human IgG1 heavy chain constant domain.

145. The antibody of claim 143 or 144, wherein the amino acid at position 238 is K.

146. The antibody of any one of claims 143-145, wherein the modified heavy chain constant region comprises an amino acid sequence that is at least 90% identical to SEQ ID NO: 198, wherein P238 is not P (or not P nor S), and is, e.g., P238K.

147. The antibody of claim 146, wherein the modified heavy chain constant region comprises an amino acid sequence that is at least 95% identical to SEQ ID NO: 198, wherein P238 is not P (or not P nor S), and is, e.g., P238K.

148. The antibody of claim 147, wherein the modified heavy chain constant region comprises an amino acid sequence that is at least 99% identical to SEQ ID NO: 198, wherein P238 is not P (or not P nor S), and is, e.g., P238K.

149. The antibody of any one of claims 143-148, wherein the modified heavy chain constant region does not comprise one or more of the non P238 amino acid modifications disclosed in U.S. Pat. No. 5,637,481 (the contents of which are specifically incorporated by reference herein), e.g., C220S, C226S and C229S.

150. The antibody of any one of claims 143-149, wherein the modified heavy chain constant region comprises an amino acid sequence consisting of SEQ ID NO: 198.

151. The antibody of any one of claims 143-150, wherein the antibody is an antigen binding fragment of an antibody (e.g., a Dab or scFv) that is linked to the modified heavy chain constant region.

152. The antibody of any one of claims 143-150, wherein the antibody comprises a heavy chain variable domain linked to the modified heavy chain constant domain and a light chain variable domain linked to a light chain constant domain.

153. The antibody of any one of claims 143-152, wherein the antibody is a full length antibody (heavy and light chain are full length heavy and light chain, respectively).

154. The antibody of any one of claims 143-153, wherein the modified heavy chain constant domain does not comprise one or more other mutations that reduce effector function.

155. The antibody of claim 154, wherein the modified heavy chain constant domain does not comprise one or more other mutations disclosed herein that reduce effector function.

156. The antibody of any one of claims 143-153, wherein the modified heavy chain constant domain comprises 1-3 other mutations that reduce effector function.

157. The antibody of claim 156, wherein the modified heavy chain constant domain comprises 1-3 other mutations disclosed herein that reduce effector function.

158. The antibody of any one of claims 143-157, wherein the effector function of the antibody is about the same as that of an IgG2 antibody.

159. The antibody of any one of claims 143-158, wherein the antibody has lower binding affinity to the low affinity Fc√Rs relative to the antibody with a wildtype IgG1.

160. The antibody of claim 159, wherein the antibody has no detectable binding to the low affinity Fc√Rs.

161. The antibody of claim 159 or 160, wherein the low affinity Fc√Rs are hCD32a-H131, hCD32a-R131, hCD32b, hCD16a-V158 and hCD16b-NA2.

162. The antibody of claim 161, wherein the antibody has no detectable binding (e.g., with 10 μM antibody concentration) towards the flow affinity Fc√Rs hCD32a-H131, hCD32a-R131, hCD32b, hCD16a-V158 or hCD16b-NA2.

163. The antibody of any one of claims 143-162, wherein the antibody binds to the high affinity FcgR CD64 (hFcgR1) with a faster off-rate (dissociation rate) relative to the antibody with a wild-type IgG1 constant region.

164. The antibody of any one of claims 143-163, wherein the antibody has no detectable binding (e.g., with 10 μM antibody concentration) towards the low affinity Fc√Rs hCD32a-H131, hCD32a-R131, hCD32b, hCD16a-V158 or hCD16b-NA2 and has a faster off-rate relative to the antibody with a wild-type constant region.

165. The antibody of any one of claims 159-164, wherein binding affinity and off-rate to Fc√Rs is determined by Biacore.

166. The antibody of any one of claims 143-165, wherein the antibody has superior thermal stability relative to the antibody with a wildtype IgG1 constant region.

167. The antibody of any one of claims 143-166, wherein the antibody has reduced heterogeneity relative to the antibody with a wildtype IgG1 constant region.

168. An antibody comprising a heavy chain constant region comprising the mutations L234A, L235E and G337A, but does not contain a mutation at A330 and/or P331 that reduces effector function (e.g., does not comprise A330S and/or P331S), wherein the antibody has reduced effector function (reduced ADCC and optionally reduced CDC) relative to the same antibody without these mutations.

169. The antibody of claim 168, which binds to an inhibitory receptor on an immune cell, e.g., a T cell.

170. The antibody of claim 168 or 169, which binds with reduced affinity to the FcγRs hCD32a-H131, hCD32a-R131, hCD32b, hCD16a-V158, hCD16b-NA2 and hCD64, relative to the same antibody without these mutations.

171. The antibody of any of claims 168-170, wherein the heavy chain constant region comprises an amino acid sequence that is at least 95% identical to SEQ ID NO: 234 or 248.

172. The antibody of any of claims 168-171, wherein the heavy chain constant region comprises the amino acid sequence SEQ ID NO: 234 or 248, including 1-5, 1-4, 1-3, 1-2 or 1 amino acid substitution (e.g., a conservative amino acid substitution), wherein the amino acid substitutions do not significantly increase binding to one or more FcγRs.

173. The antibody of any of claims 168-172, wherein the heavy chain constant region comprises the amino acid sequence SEQ ID NO: 234 or 248, including or excluding the C-terminal lysine.

174. The antibody of any of claims 168-172, wherein the heavy chain constant region comprises the amino acid sequence SEQ ID NO: 236, 249, 252, 253, 259 or 260, including or excluding the C-terminal lysine.

175. The antibody of any of claims 168-174, wherein the antibody is a full length antibody (or comprises a full length heavy chain and a full length light chain), with or without C-terminal lysine.

176. The antibody of any of claims 168-175, wherein the antibody is an antagonist of a checkpoint inhibitor or an agonist of a checkpoint stimulator.

177. The antibody of any of claims 168-176, wherein the antibody is not an antibody disclosed in WO 2018/013818.

178. The antibody of any of claims 168-177, wherein the antibody does not bind to human TIM3.

179. A fusion protein comprising a heavy chain constant region comprising the mutations L234A, L235E and G337A, but does not contain a mutation at A330 and/or P331 that reduces effector function (e.g., does not comprise A330S and/or P331S), wherein the antibody has reduced effector function (reduced ADCC and optionally reduced CDC) relative to the same antibody without these mutations.

180. The fusion protein of claim 179, which binds with reduced affinity to the FcγRs hCD32a-H131, hCD32a-R131, hCD32b, hCD16a-V158, hCD16b-NA2 and hCD64, relative to the same antibody without these mutations.

181. The fusion protein of claim 179 or 180, wherein the heavy chain constant region comprises an amino acid sequence that is at least 95% identical to SEQ ID NO: 234 or 248.

182. The fusion protein of any of claims 179-181, wherein the heavy chain constant region comprises the amino acid sequence SEQ ID NO: 234 or 248, including 1-5, 1-4, 1-3, 1-2 or 1 amino acid substitution (e.g., a conservative amino acid substitution), wherein the amino acid substitutions do not significantly increase binding to one or more FcγRs.

183. The fusion protein of any of claims 179-182, wherein the heavy chain constant region comprises the amino acid sequence SEQ ID NO: 234 or 248, including or excluding the C-terminal lysine.

184. The antibody of any of claims 179-183, wherein the heavy chain constant region comprises the amino acid sequence SEQ ID NO: 236, 249, 252, 253, 259 or 260, including or excluding the C-terminal lysine.

185. An antibody comprising a heavy chain constant region comprising an amino acid sequence set forth in the Sequence Table or a sequence that is at least 95% identical thereto.

The application's sequence listing, which the Patent Office published only in electronic form, follows.

SEQUENCE LISTING (275 sequences)

SEQ ID NO: 1 - protein, 330 aa, Artificial Sequence
  Synthetic: Full-length IgG1 wild-type
ASTKGPSVFPLAPSSKSTSGGTAALGCLVKDYFPEPVTVSWNSGALTSGVHTFPAVLQSSGLYSLSSVVTVPSSSLGTQTYICNVNHKPSNTKVDKKVEPKSCDKTHTCPPCPAPELLGGPSVFLFPPKPKDTLMISRTPEVTCVVVDVSHEDPEVKFNWYVDGVEVHNAKTKPREEQYNSTYRVVSVLTVLHQDWLNGKEYKCKVSNKALPAPIEKTISKAKGQPREPQVYTLPPSREEMTKNQVSLTCLVKGFYPSDIAVEWESNGQPENNYKTTPPVLDSDGSFFLYSKLTVDKSRWQQGNVFSCSVMHEALHNHYTQKSLSLSPGK

SEQ ID NO: 2 - protein, 98 aa, Artificial Sequence
  Synthetic: CH1 IgG1 wild-type
ASTKGPSVFPLAPSSKSTSGGTAALGCLVKDYFPEPVTVSWNSGALTSGVHTFPAVLQSSGLYSLSSVVTVPSSSLGTQTYICNVNHKPSNTKVDKKV

SEQ ID NO: 3 - protein, 22 aa, Artificial Sequence
  Synthetic: Hinge IgG1 wild-type
EPKSCDKTHTCPPCPAPELLGG

SEQ ID NO: 4 - protein, 103 aa, Artificial Sequence
  Synthetic: CH2 IgG1 wild-type
PSVFLFPPKPKDTLMISRTPEVTCVVVDVSHEDPEVKFNWYVDGVEVHNAKTKPREEQYNSTYRVVSVLTVLHQDWLNGKEYKCKVSNKALPAPIEKTISKAK

SEQ ID NO: 5 - protein, 107 aa, Artificial Sequence
  Synthetic: CH3 IgG1 wild-type
GQPREPQVYTLPPSREEMTKNQVSLTCLVKGFYPSDIAVEWESNGQPENNYKTTPPVLDSDGSFFLYSKLTVDKSRWQQGNVFSCSVMHEALHNHYTQKSLSLSPGK

SEQ ID NO: 6 - protein, 326 aa, Artificial Sequence
  Synthetic: Full-length IgG2 wild-type
ASTKGPSVFPLAPCSRSTSESTAALGCLVKDYFPEPVTVSWNSGALTSGVHTFPAVLQSSGLYSLSSVVTVPSSNFGTQTYTCNVDHKPSNTKVDKTVERKCCVECPPCPAPPVAGPSVFLFPPKPKDTLMISRTPEVTCVVVDVSHEDPEVQFNWYVDGVEVHNAKTKPREEQFNSTFRVVSVLTVVHQDWLNGKEYKCKVSNKGLPAPIEKTISKTKGQPREPQVYTLPPSREEMTKNQVSLTCLVKGFYPSDIAVEWESNGQPENNYKTTPPMLDSDGSFFLYSKLTVDKSRWQQGNVFSCSVMHEALHNHYTQKSLSLSPGK

SEQ ID NO: 7 - protein, 98 aa, Artificial Sequence
  Synthetic: CH1 IgG2 wild-type
ASTKGPSVFPLAPCSRSTSESTAALGCLVKDYFPEPVTVSWNSGALTSGVHTFPAVLQSSGLYSLSSVVTVPSSNFGTQTYTCNVDHKPSNTKVDKTV

SEQ ID NO: 8 - protein, 18 aa, Artificial Sequence
  Synthetic: Hinge IgG2 wild-type
ERKCCVECPPCPAPPVAG

SEQ ID NO: 9 - protein, 103 aa, Artificial Sequence
  Synthetic: CH2 IgG2 wild-type
PSVFLFPPKPKDTLMISRTPEVTCVVVDVSHEDPEVQFNWYVDGVEVHNAKTKPREEQFNSTFRVVSVLTVVHQDWLNGKEYKCKVSNKGLPAPIEKTISKTK

SEQ ID NO: 10 - protein, 107 aa, Artificial Sequence
  Synthetic: CH3 IgG2 wild-type
GQPREPQVYTLPPSREEMTKNQVSLTCLVKGFYPSDIAVEWESNGQPENNYKTTPPMLDSDGSFFLYSKLTVDKSRWQQGNVFSCSVMHEALHNHYTQKSLSLSPGK

SEQ ID NO: 11 - protein, 377 aa, Artificial Sequence
  Synthetic: Full-length IgG3 wild-type
ASTKGPSVFPLAPCSRSTSGGTAALGCLVKDYFPEPVTVSWNSGALTSGVHTFPAVLQSSGLYSLSSVVTVPSSSLGTQTYTCNVNHKPSNTKVDKRVELKTPLGDTTHTCPRCPEPKSCDTPPPCPRCPEPKSCDTPPPCPRCPEPKSCDTPPPCPRCPAPELLGGPSVFLFPPKPKDTLMISRTPEVTCVVVDVSHEDPEVQFKWYVDGVEVHNAKTKPREEQYNSTFRVVSVLTVLHQDWLNGKEYKCKVSNKALPAPIEKTISKTKGQPREPQVYTLPPSREEMTKNQVSLTCLVKGFYPSDIAVEWESSGQPENNYNTTPPMLDSDGSFFLYSKLTVDKSRWQQGNIFSCSVMHEALHNRFTQKSLSLSPGK

SEQ ID NO: 12 - protein, 98 aa, Artificial Sequence
  Synthetic: CH1 IgG3 wild-type
ASTKGPSVFPLAPCSRSTSGGTAALGCLVKDYFPEPVTVSWNSGALTSGVHTFPAVLQSSGLYSLSSVVTVPSSSLGTQTYTCNVNHKPSNTKVDKRV

SEQ ID NO: 13 - protein, 18 aa, Artificial Sequence
  Synthetic: Hinge IgG3 wild-type
ELKTPLGDTTHTCPRCPE

SEQ ID NO: 14 - protein, 154 aa, Artificial Sequence
  Synthetic: CH2 IgG3 wild-type
PKSCDTPPPCPRCPEPKSCDTPPPCPRCPEPKSCDTPPPCPRCPAPELLGGPSVFLFPPKPKDTLMISRTPEVTCVVVDVSHEDPEVQFKWYVDGVEVHNAKTKPREEQYNSTFRVVSVLTVLHQDWLNGKEYKCKVSNKALPAPIEKTISKTK

SEQ ID NO: 15 - protein, 107 aa, Artificial Sequence
  Synthetic: CH3 IgG3 wild-type
GQPREPQVYTLPPSREEMTKNQVSLTCLVKGFYPSDIAVEWESSGQPENNYNTTPPMLDSDGSFFLYSKLTVDKSRWQQGNIFSCSVMHEALHNRFTQKSLSLSPGK

SEQ ID NO: 16 - protein, 327 aa, Artificial Sequence
  Synthetic: Full-length IgG4 wild-type
ASTKGPSVFPLAPCSRSTSESTAALGCLVKDYFPEPVTVSWNSGALTSGVHTFPAVLQSSGLYSLSSVVTVPSSSLGTKTYTCNVDHKPSNTKVDKRVESKYGPPCPSCPAPEFLGGPSVFLFPPKPKDTLMISRTPEVTCVVVDVSQEDPEVQFNWYVDGVEVHNAKTKPREEQFNSTYRVVSVLTVLHQDWLNGKEYKCKVSNKGLPSSIEKTISKAKGQPREPQVYTLPPSQEEMTKNQVSLTCLVKGFYPSDIAVEWESNGQPENNYKTTPPVLDSDGSFFLYSRLTVDKSRWQEGNVFSCSVMHEALHNHYTQKSLSLSLGK

SEQ ID NO: 17 - protein, 98 aa, Artificial Sequence
  Synthetic: CH1 IgG4 wild-type
ASTKGPSVFPLAPCSRSTSESTAALGCLVKDYFPEPVTVSWNSGALTSGVHTFPAVLQSSGLYSLSSVVTVPSSSLGTKTYTCNVDHKPSNTKVDKRV

SEQ ID NO: 18 - protein, 19 aa, Artificial Sequence
  Synthetic: Hinge IgG4 wild-type
ESKYGPPCPSCPAPEFLGG

SEQ ID NO: 19 - protein, 103 aa, Artificial Sequence
  Synthetic: CH2 IgG4 wild-type
PSVFLFPPKPKDTLMISRTPEVTCVVVDVSQEDPEVQFNWYVDGVEVHNAKTKPREEQFNSTYRVVSVLTVLHQDWLNGKEYKCKVSNKGLPSSIEKTISKAK

SEQ ID NO: 20 - protein, 107 aa, Artificial Sequence
  Synthetic: CH3 IgG4 wild-type
GQPREPQVYTLPPSQEEMTKNQVSLTCLVKGFYPSDIAVEWESNGQPENNYKTTPPVLDSDGSFFLYSRLTVDKSRWQEGNVFSCSVMHEALHNHYTQKSLSLSLGK

SEQ ID NO: 21 - protein, 18 aa, Artificial Sequence
  Synthetic: Modified IgG2 Hinge (C219S)
ERKSCVECPPCPAPPVAG

SEQ ID NO: 22 - protein, 19 aa, Artificial Sequence
  Synthetic: IgG2/IgG1 hybrid hinge
ERKCCVECPPCPAPELLGG

SEQ ID NO: 23 - protein, 19 aa, Artificial Sequence
  Synthetic: IgG2 C219S/IgG1 hybrid hinge
ERKSCVECPPCPAPELLGG

SEQ ID NO: 24 - protein, 103 aa, Artificial Sequence
  Synthetic: Modified CH2 IgG1 (A330S/P331S)
PSVFLFPPKPKDTLMISRTPEVTCVVVDVSHEDPEVKFNWYVDGVEVHNAKTKPREEQYNSTYRVVSVLTVLHQDWLNGKEYKCKVSNKALPSSIEKTISKAK

SEQ ID NO: 25 - protein, 22 aa, Artificial Sequence
  Synthetic: IgG1.1 Hinge (L234A/L235E/G237A)
EPKSCDKTHTCPPCPAPEAEGA

SEQ ID NO: 26 - protein, 326 aa, Artificial Sequence
  Synthetic: IgG1-IgG2-IgG1 (IgG1-IgG2/IgG1(SEQ#22)-IgG1-IgG1)
ASTKGPSVFPLAPSSKSTSGGTAALGCLVKDYFPEPVTVSWNSGALTSGVHTFPAVLQSSGLYSLSSVVTVPSSSLGTQTYICNVNHKPSNTKVDKKVERKCCVECPPCPAPELLGGPSVFLFPPKPKDTLMISRTPEVTCVVVDVSHEDPEVKFNWYVDGVEVHNAKTKPREEQYNSTYRVVSVLTVLHQDWLNGKEYKCKVSNKALPAPIEKTISKAKGQPREPQVYTLPPSREEMTKNQVSLTCLVKGFYPSDIAVEWESNGQPENNYKTTPPVLDSDGSFFLYSKLTVDKSRWQQGNVFSCSVMHEALHNHYTQKSLSLSPG

SEQ ID NO: 27 - protein, 325 aa, Artificial Sequence
  Synthetic: IgG1-IgG2-IgG12 (IgG1-IgG2(SEQ#8)-IgG1-IgG1)
ASTKGPSVFPLAPSSKSTSGGTAALGCLVKDYFPEPVTVSWNSGALTSGVHTFPAVLQSSGLYSLSSVVTVPSSSLGTQTYICNVNHKPSNTKVDKKVERKCCVECPPCPAPPVAGPSVFLFPPKPKDTLMISRTPEVTCVVVDVSHEDPEVKFNWYVDGVEVHNAKTKPREEQYNSTYRVVSVLTVLHQDWLNGKEYKCKVSNKALPAPIEKTISKAKGQPREPQVYTLPPSREEMTKNQVSLTCLVKGFYPSDIAVEWESNGQPENNYKTTPPVLDSDGSFFLYSKLTVDKSRWQQGNVFSCSVMHEALHNHYTQKSLSLSPG

SEQ ID NO: 28 - protein, 326 aa, Artificial Sequence
  Synthetic: IgG2-IgG1 (IgG2-IgG2/IgG1(SEQ#22)-IgG1-IgG1)
ASTKGPSVFPLAPCSRSTSESTAALGCLVKDYFPEPVTVSWNSGALTSGVHTFPAVLQSSGLYSLSSVVTVPSSNFGTQTYTCNVDHKPSNTKVDKTVERKCCVECPPCPAPELLGGPSVFLFPPKPKDTLMISRTPEVTCVVVDVSHEDPEVKFNWYVDGVEVHNAKTKPREEQYNSTYRVVSVLTVLHQDWLNGKEYKCKVSNKALPAPIEKTISKAKGQPREPQVYTLPPSREEMTKNQVSLTCLVKGFYPSDIAVEWESNGQPENNYKTTPPVLDSDGSFFLYSKLTVDKSRWQQGNVFSCSVMHEALHNHYTQKSLSLSPG

SEQ ID NO: 29 - protein, 325 aa, Artificial Sequence
  Synthetic: IgG2-IgG12 (IgG2-IgG2(SEQ#8)-IgG1-IgG1)
ASTKGPSVFPLAPCSRSTSESTAALGCLVKDYFPEPVTVSWNSGALTSGVHTFPAVLQSSGLYSLSSVVTVPSSNFGTQTYTCNVDHKPSNTKVDKTVERKCCVECPPCPAPPVAGPSVFLFPPKPKDTLMISRTPEVTCVVVDVSHEDPEVKFNWYVDGVEVHNAKTKPREEQYNSTYRVVSVLTVLHQDWLNGKEYKCKVSNKALPAPIEKTISKAKGQPREPQVYTLPPSREEMTKNQVSLTCLVKGFYPSDIAVEWESNGQPENNYKTTPPVLDSDGSFFLYSKLTVDKSRWQQGNVFSCSVMHEALHNHYTQKSLSLSPG

SEQ ID NO: 30 - protein, 325 aa, Artificial Sequence
  Synthetic: IgG1-IgG2-IgG1.1 (IgG1-IgG2(SEQ#8)-IgG1(A330S/P331S)-IgG1)
ASTKGPSVFPLAPSSKSTSGGTAALGCLVKDYFPEPVTVSWNSGALTSGVHTFPAVLQSSGLYSLSSVVTVPSSSLGTQTYICNVNHKPSNTKVDKKVERKCCVECPPCPAPPVAGPSVFLFPPKPKDTLMISRTPEVTCVVVDVSHEDPEVKFNWYVDGVEVHNAKTKPREEQYNSTYRVVSVLTVLHQDWLNGKEYKCKVSNKALPSSIEKTISKAKGQPREPQVYTLPPSREEMTKNQVSLTCLVKGFYPSDIAVEWESNGQPENNYKTTPPVLDSDGSFFLYSKLTVDKSRWQQGNVFSCSVMHEALHNHYTQKSLSLSPG

SEQ ID NO: 31 - protein, 326 aa, Artificial Sequence
  Synthetic: IgG2-IgG1.1 (IgG2-IgG2(SEQ#8)-IgG1(A330S/P331S)-IgG1)
ASTKGPSVFPLAPCSRSTSESTAALGCLVKDYFPEPVTVSWNSGALTSGVHTFPAVLQSSGLYSLSSVVTVPSSNFGTQTYTCNVDHKPSNTKVDKTVERKCCVECPPCPAPPVAGPSVFLFPPKPKDTLMISRTPEVTCVVVDVSHEDPEVKFNWYVDGVEVHNAKTKPREEQYNSTYRVVSVLTVLHQDWLNGKEYKCKVSNKALPSSIEKTISKAKGQPREPQVYTLPPSREEMTKNQVSLTCLVKGFYPSDIAVEWESNGQPENNYKTTPPVLDSDGSFFLYSKLTVDKSRWQQGNVFSCSVMHEALHNHYTQKSLSLSPGK

SEQ ID NO: 32 - protein, 325 aa, Artificial Sequence
  Synthetic: IgG1-IgG2CS-IgG1 (IgG1-IgG2(C219S)-IgG1-IgG1)
ASTKGPSVFPLAPSSKSTSGGTAALGCLVKDYFPEPVTVSWNSGALTSGVHTFPAVLQSSGLYSLSSVVTVPSSSLGTQTYICNVNHKPSNTKVDKKVERKSCVECPPCPAPPVAGPSVFLFPPKPKDTLMISRTPEVTCVVVDVSHEDPEVKFNWYVDGVEVHNAKTKPREEQYNSTYRVVSVLTVLHQDWLNGKEYKCKVSNKALPAPIEKTISKAKGQPREPQVYTLPPSREEMTKNQVSLTCLVKGFYPSDIAVEWESNGQPENNYKTTPPVLDSDGSFFLYSKLTVDKSRWQQGNVFSCSVMHEALHNHYTQKSLSLSPG

SEQ ID NO: 33 - protein, 325 aa, Artificial Sequence; identical to SEQ ID NO: 32
  Synthetic: IgG1-IgG2CS-IgG12 (IgG1-IgG2(C219S)-IgG1-IgG1)

SEQ ID NO: 34 - protein, 325 aa, Artificial Sequence
  Synthetic: IgG2CS-IgG1 (IgG2-IgG2(C219S)-IgG1-IgG1)
ASTKGPSVFPLAPCSRSTSESTAALGCLVKDYFPEPVTVSWNSGALTSGVHTFPAVLQSSGLYSLSSVVTVPSSNFGTQTYTCNVDHKPSNTKVDKTVERKSCVECPPCPAPPVAGPSVFLFPPKPKDTLMISRTPEVTCVVVDVSHEDPEVKFNWYVDGVEVHNAKTKPREEQYNSTYRVVSVLTVLHQDWLNGKEYKCKVSNKALPAPIEKTISKAKGQPREPQVYTLPPSREEMTKNQVSLTCLVKGFYPSDIAVEWESNGQPENNYKTTPPVLDSDGSFFLYSKLTVDKSRWQQGNVFSCSVMHEALHNHYTQKSLSLSPG

SEQ ID NO: 35 - protein, 325 aa, Artificial Sequence; identical to SEQ ID NO: 34
  Synthetic: IgG2CS-IgG12 (IgG2-IgG2(C219S)-IgG1-IgG1)

SEQ ID NO: 36 - protein, 325 aa, Artificial Sequence
  Synthetic: IgG1-IgG2CS-IgG1.1 (IgG1-IgG2(C219S)-IgG1(A330S/P331S)-IgG1)
ASTKGPSVFPLAPSSKSTSGGTAALGCLVKDYFPEPVTVSWNSGALTSGVHTFPAVLQSSGLYSLSSVVTVPSSSLGTQTYICNVNHKPSNTKVDKKVERKSCVECPPCPAPPVAGPSVFLFPPKPKDTLMISRTPEVTCVVVDVSHEDPEVKFNWYVDGVEVHNAKTKPREEQYNSTYRVVSVLTVLHQDWLNGKEYKCKVSNKALPSSIEKTISKAKGQPREPQVYTLPPSREEMTKNQVSLTCLVKGFYPSDIAVEWESNGQPENNYKTTPPVLDSDGSFFLYSKLTVDKSRWQQGNVFSCSVMHEALHNHYTQKSLSLSPG

SEQ ID NO: 37 - protein, 325 aa, Artificial Sequence
  Synthetic: IgG2CS-IgG1.1 (IgG2-IgG2(C219S)-IgG1(A330S/P331S)-IgG1)
ASTKGPSVFPLAPCSRSTSESTAALGCLVKDYFPEPVTVSWNSGALTSGVHTFPAVLQSSGLYSLSSVVTVPSSNFGTQTYTCNVDHKPSNTKVDKTVERKSCVECPPCPAPPVAGPSVFLFPPKPKDTLMISRTPEVTCVVVDVSHEDPEVKFNWYVDGVEVHNAKTKPREEQYNSTYRVVSVLTVLHQDWLNGKEYKCKVSNKALPSSIEKTISKAKGQPREPQVYTLPPSREEMTKNQVSLTCLVKGFYPSDIAVEWESNGQPENNYKTTPPVLDSDGSFFLYSKLTVDKSRWQQGNVFSCSVMHEALHNHYTQKSLSLSPG

SEQ ID NO: 38 - protein, 121 aa, Artificial Sequence
  Synthetic: Ab 11F11 VH
QVQLVESGGGVVQPGRSLRLSCATSGFTFSNYGMHWVRQAPGKGLEWVAVILYDGSNKYYPDSVKGRFTISRDNSKNTLYLQMNSLRAEDTAVYYCARGGSSWYPDSFDIWGQGTMVTVSS

SEQ ID NO: 39 - protein, 120 aa, Artificial Sequence
  Synthetic: Ab 4C3 VH
EVQLVESGGGLVQPGRSLRLSCAASGFTFDDYAMHWVRQAPGKGLEWVSGISWKSGSIGYADSVKGRFTISRDNAKNSLYLQMNSLRAEDTALYYCVKGYYVILTGLDYWGQGTLVTVSS

SEQ ID NO: 40 - protein, 121 aa, Artificial Sequence
  Synthetic: Ab CD73.10 VH
QVQLVESGGGVVQPGRSLRLSCAASGFTFSNYGMHWVRQAPGKGLEWVAVIWYDESNKYYPDSVKGRFTISRDNSKNTLYLQMNSLRAEDTAVYYCARGGSSWYPDSFDIWGQGTMVTVSS

SEQ ID NO: 41 - protein, 120 aa, Artificial Sequence
  Synthetic: Ab CD73.3 VH  (4C3 / V94A)
EVQLVESGGGLVQPGRSLRLSCAASGFTFDDYAMHWVRQAPGKGLEWVSGISWKSGSIGYADSVKGRFTISRDNAKNSLYLQMNSLRAEDTVLYYCVKGYYVILTGLDYWGQGTLVTVSS

SEQ ID NO: 42 - protein, 121 aa, Artificial Sequence
  Synthetic: Ab 6E11 VH
EVQLVESGGALVQPGRSLRLSCAASGFTFDDYAMHWVRQAPGKGLEWVSGITWNSGGIGYADSVKGRFTISRDNAKNSLYLQMNSLRAEDTALYYCAKDRYYSSWLLFDNWGQGILVTVSS

SEQ ID NO: 43 - protein, 121 aa, Artificial Sequence
  Synthetic: Ab CD73.4 VH
QVQLVESGGGVVQPGRSLRLSCAASGFTFSNYGMHWVRQAPGKGLEWVAVILYDGSNKYYPDSVKGRFTISRDNSKNTLYLQMNSLRAEDTAVYYCARGGSSWYPDSFDIWGQGTMVTVSS

SEQ ID NO: 44 - protein, 447 aa, Artificial Sequence
  Synthetic: Ab 11F11 full-length HC
QVQLVESGGGVVQPGRSLRLSCATSGFTFSNYGMHWVRQAPGKGLEWVAVILYDGSNKYYPDSVKGRFTISRDNSKNTLYLQMNSLRAEDTAVYYCARGGSSWYPDSFDIWGQGTMVTVSSASTKGPSVFPLAPCSRSTSESTAALGCLVKDYFPEPVTVSWNSGALTSGVHTFPAVLQSSGLYSLSSVVTVPSSNFGTQTYTCNVDHKPSNTKVDKTVERKCCVECPPCPAPPVAGPSVFLFPPKPKDTLMISRTPEVTCVVVDVSHEDPEVQFNWYVDGVEVHNAKTKPREEQFNSTFRVVSVLTVVHQDWLNGKEYKCKVSNKGLPAPIEKTISKTKGQPREPQVYTLPPSREEMTKNQVSLTCLVKGFYPSDIAVEWESNGQPENNYKTTPPMLDSDGSFFLYSKLTVDKSRWQQGNVFSCSVMHEALHNHYTQKSLSLSPGK

SEQ ID NO: 45 - protein, 450 aa, Artificial Sequence
  Synthetic: Ab 4C3 full-length HC
EVQLVESGGGLVQPGRSLRLSCAASGFTFDDYAMHWVRQAPGKGLEWVSGISWKSGSIGYADSVKGRFTISRDNAKNSLYLQMNSLRAEDTALYYCVKGYYVILTGLDYWGQGTLVTVSSASTKGPSVFPLAPSSKSTSGGTAALGCLVKDYFPEPVTVSWNSGALTSGVHTFPAVLQSSGLYSLSSVVTVPSSSLGTQTYICNVNHKPSNTKVDKKVEPKSCDKTHTCPPCPAPELLGGPSVFLFPPKPKDTLMISRTPEVTCVVVDVSHEDPEVKFNWYVDGVEVHNAKTKPREEQYNSTYRVVSVLTVLHQDWLNGKEYKCKVSNKALPAPIEKTISKAKGQPREPQVYTLPPSRDELTKNQVSLTCLVKGFYPSDIAVEWESNGQPENNYKTTPPVLDSDGSFFLYSKLTVDKSRWQQGNVFSCSVMHEALHNHYTQKSLSLSPGK

SEQ ID NO: 46 - protein, 451 aa, Artificial Sequence
  Synthetic: Ab 6E11 full-length HC
EVQLVESGGALVQPGRSLRLSCAASGFTFDDYAMHWVRQAPGKGLEWVSGITWNSGGIGYADSVKGRFTISRDNAKNSLYLQMNSLRAEDTALYYCAKDRYYSSWLLFDNWGQGILVTVSSASTKGPSVFPLAPSSKSTSGGTAALGCLVKDYFPEPVTVSWNSGALTSGVHTFPAVLQSSGLYSLSSVVTVPSSSLGTQTYICNVNHKPSNTKVDKKVEPKSCDKTHTCPPCPAPELLGGPSVFLFPPKPKDTLMISRTPEVTCVVVDVSHEDPEVKFNWYVDGVEVHNAKTKPREEQYNSTYRVVSVLTVLHQDWLNGKEYKCKVSNKALPAPIEKTISKAKGQPREPQVYTLPPSRDELTKNQVSLTCLVKGFYPSDIAVEWESNGQPENNYKTTPPVLDSDGSFFLYSKLTVDKSRWQQGNVFSCSVMHEALHNHYTQKSLSLSPGK

SEQ ID NO: 47 - protein, 446 aa, Artificial Sequence
  Synthetic: Ab CD73.10-IgG2-C219S full-length HC
QVQLVESGGGVVQPGRSLRLSCAASGFTFSNYGMHWVRQAPGKGLEWVAVIWYDESNKYYPDSVKGRFTISRDNSKNTLYLQMNSLRAEDTAVYYCARGGSSWYPDSFDIWGQGTMVTVSSASTKGPSVFPLAPCSRSTSESTAALGCLVKDYFPEPVTVSWNSGALTSGVHTFPAVLQSSGLYSLSSVVTVPSSNFGTQTYTCNVDHKPSNTKVDKTVERKSCVECPPCPAPPVAGPSVFLFPPKPKDTLMISRTPEVTCVVVDVSHEDPEVQFNWYVDGVEVHNAKTKPREEQFNSTFRVVSVLTVVHQDWLNGKEYKCKVSNKGLPAPIEKTISKTKGQPREPQVYTLPPSREEMTKNQVSLTCLVKGFYPSDIAVEWESNGQPENNYKTTPPMLDSDGSFFLYSKLTVDKSRWQQGNVFSCSVMHEALHNHYTQKSLSLSPG

SEQ ID NO: 48 - protein, 446 aa, Artificial Sequence
  Synthetic: Ab CD73.10-IgG2-C219S-IgG1.1 full-length HC
QVQLVESGGGVVQPGRSLRLSCAASGFTFSNYGMHWVRQAPGKGLEWVAVIWYDESNKYYPDSVKGRFTISRDNSKNTLYLQMNSLRAEDTAVYYCARGGSSWYPDSFDIWGQGTMVTVSSASTKGPSVFPLAPCSRSTSESTAALGCLVKDYFPEPVTVSWNSGALTSGVHTFPAVLQSSGLYSLSSVVTVPSSNFGTQTYTCNVDHKPSNTKVDKTVERKSCVECPPCPAPPVAGPSVFLFPPKPKDTLMISRTPEVTCVVVDVSHEDPEVKFNWYVDGVEVHNAKTKPREEQYNSTYRVVSVLTVLHQDWLNGKEYKCKVSNKALPSSIEKTISKAKGQPREPQVYTLPPSREEMTKNQVSLTCLVKGFYPSDIAVEWESNGQPENNYKTTPPMLDSDGSFFLYSKLTVDKSRWQQGNVFSCSVMHEALHNHYTQKSLSLSPG

SEQ ID NO: 49 - protein, 450 aa, Artificial Sequence
  Synthetic: Ab CD73.10-IgG1.1 full-length HC   (IgG1.1 IgG1.1(L234A/L235E/G237A)-IgG1.1(A330S/P331S)-IgG1.1)
QVQLVESGGGVVQPGRSLRLSCAASGFTFSNYGMHWVRQAPGKGLEWVAVIWYDESNKYYPDSVKGRFTISRDNSKNTLYLQMNSLRAEDTAVYYCARGGSSWYPDSFDIWGQGTMVTVSSASTKGPSVFPLAPSSKSTSGGTAALGCLVKDYFPEPVTVSWNSGALTSGVHTFPAVLQSSGLYSLSSVVTVPSSSLGTQTYICNVNHKPSNTKVDKKVEPKSCDKTHTCPPCPAPEAEGAPSVFLFPPKPKDTLMISRTPEVTCVVVDVSHEDPEVKFNWYVDGVEVHNAKTKPREEQYNSTYRVVSVLTVLHQDWLNGKEYKCKVSNKALPSSIEKTISKAKGQPREPQVYTLPPSREEMTKNQVSLTCLVKGFYPSDIAVEWESNGQPENNYKTTPPVLDSDGSFFLYSKLTVDKSRWQQGNVFSCSVMHEALHNHYTQKSLSLSPG

SEQ ID NO: 50 - protein, 446 aa, Artificial Sequence
  Synthetic: Ab CD73.4-IgG2-C219S full-length HC
QVQLVESGGGVVQPGRSLRLSCAASGFTFSNYGMHWVRQAPGKGLEWVAVILYDGSNKYYPDSVKGRFTISRDNSKNTLYLQMNSLRAEDTAVYYCARGGSSWYPDSFDIWGQGTMVTVSSASTKGPSVFPLAPCSRSTSESTAALGCLVKDYFPEPVTVSWNSGALTSGVHTFPAVLQSSGLYSLSSVVTVPSSNFGTQTYTCNVDHKPSNTKVDKTVERKSCVECPPCPAPPVAGPSVFLFPPKPKDTLMISRTPEVTCVVVDVSHEDPEVQFNWYVDGVEVHNAKTKPREEQFNSTFRVVSVLTVVHQDWLNGKEYKCKVSNKGLPAPIEKTISKTKGQPREPQVYTLPPSREEMTKNQVSLTCLVKGFYPSDIAVEWESNGQPENNYKTTPPMLDSDGSFFLYSKLTVDKSRWQQGNVFSCSVMHEALHNHYTQKSLSLSPG

SEQ ID NO: 51 - protein, 449 aa, Artificial Sequence
  Synthetic: Ab CD73.3-IgG1.1 full-length HC  (IgG1.1 IgG1.1(L234A/L235E/G237A)-IgG1.1(A330S/P331S)-IgG1.1)
EVQLVESGGGLVQPGRSLRLSCAASGFTFDDYAMHWVRQAPGKGLEWVSGISWKSGSIGYADSVKGRFTISRDNAKNSLYLQMNSLRAEDTVLYYCVKGYYVILTGLDYWGQGTLVTVSSASTKGPSVFPLAPSSKSTSGGTAALGCLVKDYFPEPVTVSWNSGALTSGVHTFPAVLQSSGLYSLSSVVTVPSSSLGTQTYICNVNHKPSNTKVDKKVEPKSCDKTHTCPPCPAPEAEGAPSVFLFPPKPKDTLMISRTPEVTCVVVDVSHEDPEVKFNWYVDGVEVHNAKTKPREEQYNSTYRVVSVLTVLHQDWLNGKEYKCKVSNKALPSSIEKTISKAKGQPREPQVYTLPPSREEMTKNQVSLTCLVKGFYPSDIAVEWESNGQPENNYKTTPPVLDSDGSFFLYSKLTVDKSRWQQGNVFSCSVMHEALHNHYTQKSLSLSPG

SEQ ID NO: 52 - protein, 326 aa, Artificial Sequence; identical to SEQ ID NO: 6
  Synthetic: Full-length heavy chain constant region IgG2-IgG2-IgG2-IgG2

SEQ ID NO: 53 - protein, 330 aa, Artificial Sequence; identical to SEQ ID NO: 1
  Synthetic: Full-length heavy chain constant region IgG1-IgG1-IgG1-IgG1

SEQ ID NO: 54 - protein, 329 aa, Artificial Sequence
  Synthetic: Full-length heavy chain constant region IgG1-IgG1.1(L234A/L235E/G237A)-IgG1.1 (A330S/P331S)-IgG1
ASTKGPSVFPLAPSSKSTSGGTAALGCLVKDYFPEPVTVSWNSGALTSGVHTFPAVLQSSGLYSLSSVVTVPSSSLGTQTYICNVNHKPSNTKVDKKVEPKSCDKTHTCPPCPAPEAEGAPSVFLFPPKPKDTLMISRTPEVTCVVVDVSHEDPEVKFNWYVDGVEVHNAKTKPREEQYNSTYRVVSVLTVLHQDWLNGKEYKCKVSNKALPSSIEKTISKAKGQPREPQVYTLPPSREEMTKNQVSLTCLVKGFYPSDIAVEWESNGQPENNYKTTPPVLDSDGSFFLYSKLTVDKSRWQQGNVFSCSVMHEALHNHYTQKSLSLSPG

SEQ ID NO: 55 - protein, 326 aa, Artificial Sequence; identical to SEQ ID NO: 28
  Synthetic: Full-length heavy chain constant region IgG2-IgG2/IgG1 hybrid-IgG1-IgG1

SEQ ID NO: 56 - protein, 325 aa, Artificial Sequence
  Synthetic: Full-length heavy chain constant region IgG2-IgG2-IgG1.1(A330/P331S)-IgG1
ASTKGPSVFPLAPCSRSTSESTAALGCLVKDYFPEPVTVSWNSGALTSGVHTFPAVLQSSGLYSLSSVVTVPSSNFGTQTYTCNVDHKPSNTKVDKTVERKCCVECPPCPAPPVAGPSVFLFPPKPKDTLMISRTPEVTCVVVDVSHEDPEVKFNWYVDGVEVHNAKTKPREEQYNSTYRVVSVLTVLHQDWLNGKEYKCKVSNKALPSSIEKTISKAKGQPREPQVYTLPPSREEMTKNQVSLTCLVKGFYPSDIAVEWESNGQPENNYKTTPPVLDSDGSFFLYSKLTVDKSRWQQGNVFSCSVMHEALHNHYTQKSLSLSPG

SEQ ID NO: 57 - protein, 5 aa, Artificial Sequence
  Synthetic: Table 2  hinge domain
VDKRV

SEQ ID NO: 58 - protein, 5 aa, Artificial Sequence
  Synthetic: Table 2  hinge domain
VDKTV

SEQ ID NO: 59 - protein, 10 aa, Artificial Sequence
  Synthetic: Table 2  hinge domain
EPKSCDKTHT

SEQ ID NO: 60 - protein, 3 aa, Artificial Sequence
  Synthetic: Table 2  hinge domain
ERK

SEQ ID NO: 61 - protein, 12 aa, Artificial Sequence
  Synthetic: Table 2  hinge domain
ELKTPLGDTTHT

SEQ ID NO: 62 - protein, 4 aa, Artificial Sequence
  Synthetic: Table 2  hinge domain
EPKS

SEQ ID NO: 63 - protein, 7 aa, Artificial Sequence
  Synthetic: Table 2  hinge domain
ESKYGPP

SEQ ID NO: 64 - protein, 5 aa, Artificial Sequence
  Synthetic: Table 2  hinge domain
CPPCP

SEQ ID NO: 65 - protein, 9 aa, Artificial Sequence
  Synthetic: Table 2  hinge domain
CCVECPPCP

SEQ ID NO: 66 - protein, 5 aa, Artificial Sequence
  Synthetic: Table 2  hinge domain
CPRCP

SEQ ID NO: 67 - protein, 15 aa, Artificial Sequence
  Synthetic: Table 2  hinge domain
EPKSCDTPPPCPRCP

SEQ ID NO: 68 - protein, 11 aa, Artificial Sequence
  Synthetic: Table 2  hinge domain
CDTPPPCPRCP

SEQ ID NO: 69 - protein, 5 aa, Artificial Sequence
  Synthetic: Table 2  hinge domain
CPSCP

SEQ ID NO: 70 - protein, 7 aa, Artificial Sequence
  Synthetic: Table 2  hinge domain
APELLGG

SEQ ID NO: 71 - protein, 6 aa, Artificial Sequence
  Synthetic: Table 2  hinge domain
APPVAG

SEQ ID NO: 72 - protein, 214 aa, Artificial Sequence
  Synthetic: Light chain 11F11
DIQMTQSPSSLSASVGDRVTITCRASQGISSWLAWYQQKPEKAPKSLIYAASSLQSGVPSRFSGSGSGTDFTLTISSLQPEDFATYYCQQYNSYPLTFGGGTKVEIKRTVAAPSVFIFPPSDEQLKSGTASVVCLLNNFYPREAKVQWKVDNALQSGNSQESVTEQDSKDSTYSLSSTLTLSKADYEKHKVYACEVTHQGLSSPVTKSFNRGEC

SEQ ID NO: 73 - protein, 214 aa, Artificial Sequence
  Synthetic: Light chain 4C3
EIVLTQSPGTLSLSPGERATLSCRASQSVSSYLAWYQQKPGQAPRLLIYGASSRATGIPDRFSGSGSGTDFTLTISRLEPEDFAVYYCQQYGSSPLTFGGGTKVEIKRTVAAPSVFIFPPSDEQLKSGTASVVCLLNNFYPREAKVQWKVDNALQSGNSQESVTEQDSKDSTYSLSSTLTLSKADYEKHKVYACEVTHQGLSSPVTKSFNRGEC

SEQ ID NO: 74 - protein, 214 aa, Artificial Sequence
  Synthetic: Light chain 6D11
EIVLTQSPGTLSLSPGERATLSCRASQSVSSSYLAWYQQKPGQAPRLLIYGASSRATGIPDRFSGSGSGTDFTLTISRLEPEDFAVYYCQHYGSSFTFGPGTKVDIKRTVAAPSVFIFPPSDEQLKSGTASVVCLLNNFYPREAKVQWKVDNALQSGNSQESVTEQDSKDSTYSLSSTLTLSKADYEKHKVYACEVTHQGLSSPVTKSFNRGEC

SEQ ID NO: 75 - protein, 124 aa, Artificial Sequence
  Synthetic: Anti-GITR AbVH
QVQLVESGGGVVQPGRSLRLSCAASGFTFSSYGMHWVRQAPGKGLEWVAVIWYEGSNKYYADSVKGRFTISRDNSKNTLYLQMNSLRAEDTAVYYCARGGSMVRGDYYYGMDVWGQGTTVTVSS

SEQ ID NO: 76 - protein, 107 aa, Artificial Sequence
  Synthetic: Anti-GITR Ab VL
AIQLTQSPSSLSASVGDRVTITCRASQGISSALAWYQQKPGKAPKLLIYDASSLESGVPSRFSGSGSGTDFTLTISSLQPEDFATYYCQQFNSYPYTFGQGTKLEIK

SEQ ID NO: 77 - protein, 214 aa, Artificial Sequence
  Synthetic: Anti-GITR Ab LC
AIQLTQSPSSLSASVGDRVTITCRASQGISSALAWYQQKPGKAPKLLIYDASSLESGVPSRFSGSGSGTDFTLTISSLQPEDFATYYCQQFNSYPYTFGQGTKLEIKRTVAAPSVFIFPPSDEQLKSGTASVVCLLNNFYPREAKVQWKVDNALQSGNSQESVTEQDSKDSTYSLSSTLTLSKADYEKHKVYACEVTHQGLSSPVTKSFNRGEC

SEQ ID NO: 78 - protein, 330 aa, Artificial Sequence
  Synthetic: IgG1f
ASTKGPSVFPLAPSSKSTSGGTAALGCLVKDYFPEPVTVSWNSGALTSGVHTFPAVLQSSGLYSLSSVVTVPSSSLGTQTYICNVNHKPSNTKVDKRVEPKSCDKTHTCPPCPAPELLGGPSVFLFPPKPKDTLMISRTPEVTCVVVDVSHEDPEVKFNWYVDGVEVHNAKTKPREEQYNSTYRVVSVLTVLHQDWLNGKEYKCKVSNKALPAPIEKTISKAKGQPREPQVYTLPPSREEMTKNQVSLTCLVKGFYPSDIAVEWESNGQPENNYKTTPPVLDSDGSFFLYSKLTVDKSRWQQGNVFSCSVMHEALHNHYTQKSLSLSPGK

SEQ ID NO: 79 - protein, 326 aa, Artificial Sequence
  Synthetic: IgG2.3
ASTKGPSVFPLAPCSRSTSESTAALGCLVKDYFPEPVTVSWNSGALTSGVHTFPAVLQSSGLYSLSSVVTVPSSNFGTQTYTCNVDHKPSNTKVDKTVERKSCVECPPCPAPPVAGPSVFLFPPKPKDTLMISRTPEVTCVVVDVSHEDPEVQFNWYVDGVEVHNAKTKPREEQFNSTFRVVSVLTVVHQDWLNGKEYKCKVSNKGLPAPIEKTISKTKGQPREPQVYTLPPSREEMTKNQVSLTCLVKGFYPSDIAVEWESNGQPENNYKTTPPMLDSDGSFFLYSKLTVDKSRWQQGNVFSCSVMHEALHNHYTQKSLSLSPGK

SEQ ID NO: 80 - protein, 327 aa, Artificial Sequence
  Synthetic: IgG2.3G1-AY
ASTKGPSVFPLAPCSRSTSESTAALGCLVKDYFPEPVTVSWNSGALTSGVHTFPAVLQSSGLYSLSSVVTVPSSNFGTQTYTCNVDHKPSNTKVDKTVERKSCVECPPCPAPELLGGPSVFLFPPKPKDTLMISRTPEVTCVVVDVSHEDPEVKFNWYVDGVEVHNAKTKPREEQYNSTYRVVSVLTVLHQDWLNGKEYKCKVSNKALPAPIEKTISKAKGQPREPQVYTLPPSREEMTKNQVSLTCLVKGFYPSDIAVEWESNGQPENNYKTTPPVLDSDGSFFLYSKLTVDKSRWQQGNVFSCSVMHEALHNHYTQKSLSLSPGK

SEQ ID NO: 81 - protein, 326 aa, Artificial Sequence
  Synthetic: IgG2.3G1-KH
ASTKGPSVFPLAPCSRSTSESTAALGCLVKDYFPEPVTVSWNSGALTSGVHTFPAVLQSSGLYSLSSVVTVPSSNFGTQTYTCNVDHKPSNTKVDKTVERKSCVECPPCPAPPVAGPSVFLFPPKPKDTLMISRTPEVTCVVVDVSHEDPEVKFNWYVDGVEVHNAKTKPREEQYNSTYRVVSVLTVLHQDWLNGKEYKCKVSNKALPAPIEKTISKAKGQPREPQVYTLPPSREEMTKNQVSLTCLVKGFYPSDIAVEWESNGQPENNYKTTPPVLDSDGSFFLYSKLTVDKSRWQQGNVFSCSVMHEALHNHYTQKSLSLSPGK

SEQ ID NO: 82 - protein, 326 aa, Artificial Sequence
  Synthetic: IgG2.5
ASTKGPSVFPLAPSSRSTSESTAALGCLVKDYFPEPVTVSWNSGALTSGVHTFPAVLQSSGLYSLSSVVTVPSSNFGTQTYTCNVDHKPSNTKVDKTVERKCCVECPPCPAPPVAGPSVFLFPPKPKDTLMISRTPEVTCVVVDVSHEDPEVQFNWYVDGVEVHNAKTKPREEQFNSTFRVVSVLTVVHQDWLNGKEYKCKVSNKGLPAPIEKTISKTKGQPREPQVYTLPPSREEMTKNQVSLTCLVKGFYPSDIAVEWESNGQPENNYKTTPPMLDSDGSFFLYSKLTVDKSRWQQGNVFSCSVMHEALHNHYTQKSLSLSPGK

SEQ ID NO: 83 - protein, 330 aa, Artificial Sequence
  Synthetic: IgG1.1f
ASTKGPSVFPLAPSSKSTSGGTAALGCLVKDYFPEPVTVSWNSGALTSGVHTFPAVLQSSGLYSLSSVVTVPSSSLGTQTYICNVNHKPSNTKVDKRVEPKSCDKTHTCPPCPAPEAEGAPSVFLFPPKPKDTLMISRTPEVTCVVVDVSHEDPEVKFNWYVDGVEVHNAKTKPREEQYNSTYRVVSVLTVLHQDWLNGKEYKCKVSNKALPSSIEKTISKAKGQPREPQVYTLPPSREEMTKNQVSLTCLVKGFYPSDIAVEWESNGQPENNYKTTPPVLDSDGSFFLYSKLTVDKSRWQQGNVFSCSVMHEALHNHYTQKSLSLSPGK

SEQ ID NO: 84 - protein, 326 aa, Artificial Sequence
  Synthetic: IgG2.3G1.1f-KH
ASTKGPSVFPLAPCSRSTSESTAALGCLVKDYFPEPVTVSWNSGALTSGVHTFPAVLQSSGLYSLSSVVTVPSSNFGTQTYTCNVDHKPSNTKVDKTVERKSCVECPPCPAPPVAGPSVFLFPPKPKDTLMISRTPEVTCVVVDVSHEDPEVKFNWYVDGVEVHNAKTKPREEQYNSTYRVVSVLTVLHQDWLNGKEYKCKVSNKALPSSIEKTISKAKGQPREPQVYTLPPSREEMTKNQVSLTCLVKGFYPSDIAVEWESNGQPENNYKTTPPVLDSDGSFFLYSKLTVDKSRWQQGNVFSCSVMHEALHNHYTQKSLSLSPGK

SEQ ID NO: 85 - protein, 327 aa, Artificial Sequence
  Synthetic: IgG1-deltaTHT
ASTKGPSVFPLAPSSKSTSGGTAALGCLVKDYFPEPVTVSWNSGALTSGVHTFPAVLQSSGLYSLSSVVTVPSSSLGTQTYICNVNHKPSNTKVDKRVEPKSCDKCPPCPAPELLGGPSVFLFPPKPKDTLMISRTPEVTCVVVDVSHEDPEVKFNWYVDGVEVHNAKTKPREEQYNSTYRVVSVLTVLHQDWLNGKEYKCKVSNKALPAPIEKTISKAKGQPREPQVYTLPPSREEMTKNQVSLTCLVKGFYPSDIAVEWESNGQPENNYKTTPPVLDSDGSFFLYSKLTVDKSRWQQGNVFSCSVMHEALHNHYTQKSLSLSPGK

SEQ ID NO: 86 - protein, 329 aa, Artificial Sequence
  Synthetic: IgG2.3-plusTHT
ASTKGPSVFPLAPCSRSTSESTAALGCLVKDYFPEPVTVSWNSGALTSGVHTFPAVLQSSGLYSLSSVVTVPSSNFGTQTYTCNVDHKPSNTKVDKTVERKSCVETHTCPPCPAPPVAGPSVFLFPPKPKDTLMISRTPEVTCVVVDVSHEDPEVQFNWYVDGVEVHNAKTKPREEQFNSTFRVVSVLTVVHQDWLNGKEYKCKVSNKGLPAPIEKTISKTKGQPREPQVYTLPPSREEMTKNQVSLTCLVKGFYPSDIAVEWESNGQPENNYKTTPPMLDSDGSFFLYSKLTVDKSRWQQGNVFSCSVMHEALHNHYTQKSLSLSPGK

SEQ ID NO: 87 - protein, 329 aa, Artificial Sequence
  Synthetic: IgG2.3-plusGGG
ASTKGPSVFPLAPCSRSTSESTAALGCLVKDYFPEPVTVSWNSGALTSGVHTFPAVLQSSGLYSLSSVVTVPSSNFGTQTYTCNVDHKPSNTKVDKTVERKSCVEGGGCPPCPAPPVAGPSVFLFPPKPKDTLMISRTPEVTCVVVDVSHEDPEVQFNWYVDGVEVHNAKTKPREEQFNSTFRVVSVLTVVHQDWLNGKEYKCKVSNKGLPAPIEKTISKTKGQPREPQVYTLPPSREEMTKNQVSLTCLVKGFYPSDIAVEWESNGQPENNYKTTPPMLDSDGSFFLYSKLTVDKSRWQQGNVFSCSVMHEALHNHYTQKSLSLSPGK

SEQ ID NO: 88 - protein, 326 aa, Artificial Sequence
  Synthetic: IgG2.5G1.1f-KH
ASTKGPSVFPLAPSSRSTSESTAALGCLVKDYFPEPVTVSWNSGALTSGVHTFPAVLQSSGLYSLSSVVTVPSSNFGTQTYTCNVDHKPSNTKVDKTVERKCCVECPPCPAPPVAGPSVFLFPPKPKDTLMISRTPEVTCVVVDVSHEDPEVKFNWYVDGVEVHNAKTKPREEQYNSTYRVVSVLTVLHQDWLNGKEYKCKVSNKALPSSIEKTISKAKGQPREPQVYTLPPSREEMTKNQVSLTCLVKGFYPSDIAVEWESNGQPENNYKTTPPVLDSDGSFFLYSKLTVDKSRWQQGNVFSCSVMHEALHNHYTQKSLSLSPGK

SEQ ID NO: 89 - protein, 327 aa, Artificial Sequence
  Synthetic: IgG2.5G1-AY
ASTKGPSVFPLAPSSRSTSESTAALGCLVKDYFPEPVTVSWNSGALTSGVHTFPAVLQSSGLYSLSSVVTVPSSNFGTQTYTCNVDHKPSNTKVDKTVERKCCVECPPCPAPELLGGPSVFLFPPKPKDTLMISRTPEVTCVVVDVSHEDPEVKFNWYVDGVEVHNAKTKPREEQYNSTYRVVSVLTVLHQDWLNGKEYKCKVSNKALPAPIEKTISKAKGQPREPQVYTLPPSREEMTKNQVSLTCLVKGFYPSDIAVEWESNGQPENNYKTTPPVLDSDGSFFLYSKLTVDKSRWQQGNVFSCSVMHEALHNHYTQKSLSLSPGK

SEQ ID NO: 90 - protein, 326 aa, Artificial Sequence
  Synthetic: IgG2.5G1-KH
ASTKGPSVFPLAPSSRSTSESTAALGCLVKDYFPEPVTVSWNSGALTSGVHTFPAVLQSSGLYSLSSVVTVPSSNFGTQTYTCNVDHKPSNTKVDKTVERKCCVECPPCPAPPVAGPSVFLFPPKPKDTLMISRTPEVTCVVVDVSHEDPEVKFNWYVDGVEVHNAKTKPREEQYNSTYRVVSVLTVLHQDWLNGKEYKCKVSNKALPAPIEKTISKAKGQPREPQVYTLPPSREEMTKNQVSLTCLVKGFYPSDIAVEWESNGQPENNYKTTPPVLDSDGSFFLYSKLTVDKSRWQQGNVFSCSVMHEALHNHYTQKSLSLSPGK

SEQ ID NO: 91 - protein, 329 aa, Artificial Sequence
  Synthetic: IgG2.5-plusTHT
ASTKGPSVFPLAPSSRSTSESTAALGCLVKDYFPEPVTVSWNSGALTSGVHTFPAVLQSSGLYSLSSVVTVPSSNFGTQTYTCNVDHKPSNTKVDKTVERKCCVETHTCPPCPAPPVAGPSVFLFPPKPKDTLMISRTPEVTCVVVDVSHEDPEVQFNWYVDGVEVHNAKTKPREEQFNSTFRVVSVLTVVHQDWLNGKEYKCKVSNKGLPAPIEKTISKTKGQPREPQVYTLPPSREEMTKNQVSLTCLVKGFYPSDIAVEWESNGQPENNYKTTPPMLDSDGSFFLYSKLTVDKSRWQQGNVFSCSVMHEALHNHYTQKSLSLSPGK

SEQ ID NO: 92 - protein, 327 aa, Artificial Sequence
  Synthetic: IgG1-G2.3G1-AY
ASTKGPSVFPLAPSSKSTSGGTAALGCLVKDYFPEPVTVSWNSGALTSGVHTFPAVLQSSGLYSLSSVVTVPSSSLGTQTYICNVNHKPSNTKVDKRVERKSCVECPPCPAPELLGGPSVFLFPPKPKDTLMISRTPEVTCVVVDVSHEDPEVKFNWYVDGVEVHNAKTKPREEQYNSTYRVVSVLTVLHQDWLNGKEYKCKVSNKALPAPIEKTISKAKGQPREPQVYTLPPSREEMTKNQVSLTCLVKGFYPSDIAVEWESNGQPENNYKTTPPVLDSDGSFFLYSKLTVDKSRWQQGNVFSCSVMHEALHNHYTQKSLSLSPGK

SEQ ID NO: 93 - protein, 326 aa, Artificial Sequence
  Synthetic: IgG1-G2.3G1-KH
ASTKGPSVFPLAPSSKSTSGGTAALGCLVKDYFPEPVTVSWNSGALTSGVHTFPAVLQSSGLYSLSSVVTVPSSSLGTQTYICNVNHKPSNTKVDKRVERKSCVECPPCPAPPVAGPSVFLFPPKPKDTLMISRTPEVTCVVVDVSHEDPEVKFNWYVDGVEVHNAKTKPREEQYNSTYRVVSVLTVLHQDWLNGKEYKCKVSNKALPAPIEKTISKAKGQPREPQVYTLPPSREEMTKNQVSLTCLVKGFYPSDIAVEWESNGQPENNYKTTPPVLDSDGSFFLYSKLTVDKSRWQQGNVFSCSVMHEALHNHYTQKSLSLSPGK

SEQ ID NO: 94 - protein, 330 aa, Artificial Sequence
  Synthetic: G2-G1-G1-G1
ASTKGPSVFPLAPCSRSTSESTAALGCLVKDYFPEPVTVSWNSGALTSGVHTFPAVLQSSGLYSLSSVVTVPSSNFGTQTYTCNVDHKPSNTKVDKTVERKSCDKTHTCPPCPAPELLGGPSVFLFPPKPKDTLMISRTPEVTCVVVDVSHEDPEVKFNWYVDGVEVHNAKTKPREEQYNSTYRVVSVLTVLHQDWLNGKEYKCKVSNKALPAPIEKTISKAKGQPREPQVYTLPPSREEMTKNQVSLTCLVKGFYPSDIAVEWESNGQPENNYKTTPPVLDSDGSFFLYSKLTVDKSRWQQGNVFSCSVMHEALHNHYTQKSLSLSPGK

SEQ ID NO: 95 - protein, 330 aa, Artificial Sequence
  Synthetic: G2.5-G1-G1-G1
ASTKGPSVFPLAPSSRSTSESTAALGCLVKDYFPEPVTVSWNSGALTSGVHTFPAVLQSSGLYSLSSVVTVPSSNFGTQTYTCNVDHKPSNTKVDKTVERKSCDKTHTCPPCPAPELLGGPSVFLFPPKPKDTLMISRTPEVTCVVVDVSHEDPEVKFNWYVDGVEVHNAKTKPREEQYNSTYRVVSVLTVLHQDWLNGKEYKCKVSNKALPAPIEKTISKAKGQPREPQVYTLPPSREEMTKNQVSLTCLVKGFYPSDIAVEWESNGQPENNYKTTPPVLDSDGSFFLYSKLTVDKSRWQQGNVFSCSVMHEALHNHYTQKSLSLSPGK

SEQ ID NO: 96 - protein, 326 aa, Artificial Sequence
  Synthetic: G1-G2.3-G2-G2
ASTKGPSVFPLAPSSKSTSGGTAALGCLVKDYFPEPVTVSWNSGALTSGVHTFPAVLQSSGLYSLSSVVTVPSSSLGTQTYICNVNHKPSNTKVDKRVEPKSCVECPPCPAPPVAGPSVFLFPPKPKDTLMISRTPEVTCVVVDVSHEDPEVQFNWYVDGVEVHNAKTKPREEQFNSTFRVVSVLTVVHQDWLNGKEYKCKVSNKGLPAPIEKTISKTKGQPREPQVYTLPPSREEMTKNQVSLTCLVKGFYPSDIAVEWESNGQPENNYKTTPPMLDSDGSFFLYSKLTVDKSRWQQGNVFSCSVMHEALHNHYTQKSLSLSPGK

SEQ ID NO: 97 - protein, 330 aa, Artificial Sequence
  Synthetic: G1-KRGEGSSNLF
ASTKGPSVFPLAPSSRSTSESTAALGCLVKDYFPEPVTVSWNSGALTSGVHTFPAVLQSSGLYSLSSVVTVPSSNFGTQTYICNVNHKPSNTKVDKRVEPKSCDKTHTCPPCPAPELLGGPSVFLFPPKPKDTLMISRTPEVTCVVVDVSHEDPEVKFNWYVDGVEVHNAKTKPREEQYNSTYRVVSVLTVLHQDWLNGKEYKCKVSNKALPAPIEKTISKAKGQPREPQVYTLPPSREEMTKNQVSLTCLVKGFYPSDIAVEWESNGQPENNYKTTPPVLDSDGSFFLYSKLTVDKSRWQQGNVFSCSVMHEALHNHYTQKSLSLSPGK

SEQ ID NO: 98 - protein, 330 aa, Artificial Sequence
  Synthetic: G1-KRGEGS
ASTKGPSVFPLAPSSRSTSESTAALGCLVKDYFPEPVTVSWNSGALTSGVHTFPAVLQSSGLYSLSSVVTVPSSSLGTQTYICNVNHKPSNTKVDKRVEPKSCDKTHTCPPCPAPELLGGPSVFLFPPKPKDTLMISRTPEVTCVVVDVSHEDPEVKFNWYVDGVEVHNAKTKPREEQYNSTYRVVSVLTVLHQDWLNGKEYKCKVSNKALPAPIEKTISKAKGQPREPQVYTLPPSREEMTKNQVSLTCLVKGFYPSDIAVEWESNGQPENNYKTTPPVLDSDGSFFLYSKLTVDKSRWQQGNVFSCSVMHEALHNHYTQKSLSLSPGK

SEQ ID NO: 99 - protein, 330 aa, Artificial Sequence
  Synthetic: G1-SNLF
ASTKGPSVFPLAPSSKSTSGGTAALGCLVKDYFPEPVTVSWNSGALTSGVHTFPAVLQSSGLYSLSSVVTVPSSNFGTQTYICNVNHKPSNTKVDKRVEPKSCDKTHTCPPCPAPELLGGPSVFLFPPKPKDTLMISRTPEVTCVVVDVSHEDPEVKFNWYVDGVEVHNAKTKPREEQYNSTYRVVSVLTVLHQDWLNGKEYKCKVSNKALPAPIEKTISKAKGQPREPQVYTLPPSREEMTKNQVSLTCLVKGFYPSDIAVEWESNGQPENNYKTTPPVLDSDGSFFLYSKLTVDKSRWQQGNVFSCSVMHEALHNHYTQKSLSLSPGK

SEQ ID NO: 100 - protein, 330 aa, Artificial Sequence
  Synthetic: IgG1-ITNDRTPR
ASTKGPSVFPLAPSSKSTSGGTAALGCLVKDYFPEPVTVSWNSGALTSGVHTFPAVLQSSGLYSLSSVVTVPSSSLGTQTYTCNVDHKPSNTKVDKTVERKSCDKTHTCPPCPAPELLGGPSVFLFPPKPKDTLMISRTPEVTCVVVDVSHEDPEVKFNWYVDGVEVHNAKTKPREEQYNSTYRVVSVLTVLHQDWLNGKEYKCKVSNKALPAPIEKTISKAKGQPREPQVYTLPPSREEMTKNQVSLTCLVKGFYPSDIAVEWESNGQPENNYKTTPPVLDSDGSFFLYSKLTVDKSRWQQGNVFSCSVMHEALHNHYTQKSLSLSPGK

SEQ ID NO: 101 - protein, 329 aa, Artificial Sequence
  Synthetic: G1-SNLFPR
ASTKGPSVFPLAPSSKSTSGGTAALGCLVKDYFPEPVTVSWNSGALTSGVHTFPAVLQSSGLYSLSSVVTVPSSNFGTQTYICNVNHKPSNTKVDKRVERKSCDKTHTCPPCPAPELLGGPSVFLFPPKPKDTLMISRTPEVTCVVVDVSHEDPEVKFNWYVDGVEVHNAKTKPREEQYNSTYRVVSVLTVLHQDWLNGKEYKCKVSNKALPAPIEKTISKAKGQPREPQVYTLPPSREEMTKNQVSLTCLVKGFYPSDIAVEWESNGQPENNYKTTPPVLDSDGSFFLYSKLTVDKSRWQQGNVFSCSVMHEALHNHYTQKSLSLSPG

SEQ ID NO: 102 - protein, 326 aa, Artificial Sequence
  Synthetic: G2-RKEGSGNSFL
ASTKGPSVFPLAPCSKSTSGGTAALGCLVKDYFPEPVTVSWNSGALTSGVHTFPAVLQSSGLYSLSSVVTVPSSSLGTQTYTCNVDHKPSNTKVDKTVERKSCVECPPCPAPPVAGPSVFLFPPKPKDTLMISRTPEVTCVVVDVSHEDPEVQFNWYVDGVEVHNAKTKPREEQFNSTFRVVSVLTVVHQDWLNGKEYKCKVSNKGLPAPIEKTISKTKGQPREPQVYTLPPSREEMTKNQVSLTCLVKGFYPSDIAVEWESNGQPENNYKTTPPMLDSDGSFFLYSKLTVDKSRWQQGNVFSCSVMHEALHNHYTQKSLSLSPGK

SEQ ID NO: 103 - protein, 326 aa, Artificial Sequence
  Synthetic: G2-RKEGSG
ASTKGPSVFPLAPCSKSTSGGTAALGCLVKDYFPEPVTVSWNSGALTSGVHTFPAVLQSSGLYSLSSVVTVPSSNFGTQTYTCNVDHKPSNTKVDKTVERKSCVECPPCPAPPVAGPSVFLFPPKPKDTLMISRTPEVTCVVVDVSHEDPEVQFNWYVDGVEVHNAKTKPREEQFNSTFRVVSVLTVVHQDWLNGKEYKCKVSNKGLPAPIEKTISKTKGQPREPQVYTLPPSREEMTKNQVSLTCLVKGFYPSDIAVEWESNGQPENNYKTTPPMLDSDGSFFLYSKLTVDKSRWQQGNVFSCSVMHEALHNHYTQKSLSLSPGK

SEQ ID NO: 104 - protein, 326 aa, Artificial Sequence
  Synthetic: G2-NSFL
ASTKGPSVFPLAPCSRSTSESTAALGCLVKDYFPEPVTVSWNSGALTSGVHTFPAVLQSSGLYSLSSVVTVPSSSLGTQTYTCNVDHKPSNTKVDKTVERKSCVECPPCPAPPVAGPSVFLFPPKPKDTLMISRTPEVTCVVVDVSHEDPEVQFNWYVDGVEVHNAKTKPREEQFNSTFRVVSVLTVVHQDWLNGKEYKCKVSNKGLPAPIEKTISKTKGQPREPQVYTLPPSREEMTKNQVSLTCLVKGFYPSDIAVEWESNGQPENNYKTTPPMLDSDGSFFLYSKLTVDKSRWQQGNVFSCSVMHEALHNHYTQKSLSLSPGK

SEQ ID NO: 105 - protein, 326 aa, Artificial Sequence
  Synthetic: IgG2-TIDNTRRP
ASTKGPSVFPLAPCSRSTSESTAALGCLVKDYFPEPVTVSWNSGALTSGVHTFPAVLQSSGLYSLSSVVTVPSSNFGTQTYICNVNHKPSNTKVDKRVEPKSCVECPPCPAPPVAGPSVFLFPPKPKDTLMISRTPEVTCVVVDVSHEDPEVQFNWYVDGVEVHNAKTKPREEQFNSTFRVVSVLTVVHQDWLNGKEYKCKVSNKGLPAPIEKTISKTKGQPREPQVYTLPPSREEMTKNQVSLTCLVKGFYPSDIAVEWESNGQPENNYKTTPPMLDSDGSFFLYSKLTVDKSRWQQGNVFSCSVMHEALHNHYTQKSLSLSPGK

SEQ ID NO: 106 - protein, 326 aa, Artificial Sequence
  Synthetic: G2-NSFLRP
ASTKGPSVFPLAPCSRSTSESTAALGCLVKDYFPEPVTVSWNSGALTSGVHTFPAVLQSSGLYSLSSVVTVPSSSLGTQTYTCNVDHKPSNTKVDKTVEPKSCVECPPCPAPPVAGPSVFLFPPKPKDTLMISRTPEVTCVVVDVSHEDPEVQFNWYVDGVEVHNAKTKPREEQFNSTFRVVSVLTVVHQDWLNGKEYKCKVSNKGLPAPIEKTISKTKGQPREPQVYTLPPSREEMTKNQVSLTCLVKGFYPSDIAVEWESNGQPENNYKTTPPMLDSDGSFFLYSKLTVDKSRWQQGNVFSCSVMHEALHNHYTQKSLSLSPGK

SEQ ID NO: 107 - protein, 330 aa, Artificial Sequence
  Synthetic: G1-G1-G2-G1-AY
ASTKGPSVFPLAPSSKSTSGGTAALGCLVKDYFPEPVTVSWNSGALTSGVHTFPAVLQSSGLYSLSSVVTVPSSSLGTQTYICNVNHKPSNTKVDKRVEPKSCDKTHTCPPCPAPELLGGPSVFLFPPKPKDTLMISRTPEVTCVVVDVSHEDPEVQFNWYVDGVEVHNAKTKPREEQFNSTFRVVSVLTVVHQDWLNGKEYKCKVSNKGLPAPIEKTISKTKGQPREPQVYTLPPSREEMTKNQVSLTCLVKGFYPSDIAVEWESNGQPENNYKTTPPVLDSDGSFFLYSKLTVDKSRWQQGNVFSCSVMHEALHNHYTQKSLSLSPGK

SEQ ID NO: 108 - protein, 329 aa, Artificial Sequence
  Synthetic: G1-G1-G2-G1-KH
ASTKGPSVFPLAPSSKSTSGGTAALGCLVKDYFPEPVTVSWNSGALTSGVHTFPAVLQSSGLYSLSSVVTVPSSSLGTQTYICNVNHKPSNTKVDKRVEPKSCDKTHTCPPCPAPPVAGPSVFLFPPKPKDTLMISRTPEVTCVVVDVSHEDPEVQFNWYVDGVEVHNAKTKPREEQFNSTFRVVSVLTVVHQDWLNGKEYKCKVSNKGLPAPIEKTISKTKGQPREPQVYTLPPSREEMTKNQVSLTCLVKGFYPSDIAVEWESNGQPENNYKTTPPVLDSDGSFFLYSKLTVDKSRWQQGNVFSCSVMHEALHNHYTQKSLSLSPGK

SEQ ID NO: 109 - protein, 326 aa, Artificial Sequence
  Synthetic: G2-G2.3-G1-G2-KH
ASTKGPSVFPLAPCSRSTSESTAALGCLVKDYFPEPVTVSWNSGALTSGVHTFPAVLQSSGLYSLSSVVTVPSSNFGTQTYTCNVDHKPSNTKVDKTVERKSCVECPPCPAPPVAGPSVFLFPPKPKDTLMISRTPEVTCVVVDVSHEDPEVKFNWYVDGVEVHNAKTKPREEQYNSTYRVVSVLTVLHQDWLNGKEYKCKVSNKALPAPIEKTISKAKGQPREPQVYTLPPSREEMTKNQVSLTCLVKGFYPSDIAVEWESNGQPENNYKTTPPMLDSDGSFFLYSKLTVDKSRWQQGNVFSCSVMHEALHNHYTQKSLSLSPGK

SEQ ID NO: 110 - protein, 326 aa, Artificial Sequence
  Synthetic: G2.5-G2.3-G1-G2-KH
ASTKGPSVFPLAPSSRSTSESTAALGCLVKDYFPEPVTVSWNSGALTSGVHTFPAVLQSSGLYSLSSVVTVPSSNFGTQTYTCNVDHKPSNTKVDKTVERKSCVECPPCPAPPVAGPSVFLFPPKPKDTLMISRTPEVTCVVVDVSHEDPEVKFNWYVDGVEVHNAKTKPREEQYNSTYRVVSVLTVLHQDWLNGKEYKCKVSNKALPAPIEKTISKAKGQPREPQVYTLPPSREEMTKNQVSLTCLVKGFYPSDIAVEWESNGQPENNYKTTPPMLDSDGSFFLYSKLTVDKSRWQQGNVFSCSVMHEALHNHYTQKSLSLSPGK

SEQ ID NO: 111 - protein, 326 aa, Artificial Sequence
  Synthetic: G2-G2.3-G1-G2-AY
ASTKGPSVFPLAPCSRSTSESTAALGCLVKDYFPEPVTVSWNSGALTSGVHTFPAVLQSSGLYSLSSVVTVPSSNFGTQTYTCNVDHKPSNTKVDKTVERKSCVECPPCPAPELLGGPSVFLFPPKPKDTLMISRTPEVTCVVVDVSHEDPEVKFNWYVDGVEVHNAKTKPREEQYNSTYRVVSVLTVLHQDWLNGKEYKCKVSNKALPAPIEKTISKAKGQPREPQVYTLPPSREEMTKNQVSLTCLVKGFYPSDIAVEWESNGQPENNYKTTPPMLDSDGSFFLYSKLTVDKSRWQQGNVFSCSVMHEALHNHYTQKSLSLSPG

SEQ ID NO: 112 - protein, 327 aa, Artificial Sequence
  Synthetic: G2.5-G2.3-G1-G2-AY
ASTKGPSVFPLAPSSRSTSESTAALGCLVKDYFPEPVTVSWNSGALTSGVHTFPAVLQSSGLYSLSSVVTVPSSNFGTQTYTCNVDHKPSNTKVDKTVERKSCVECPPCPAPELLGGPSVFLFPPKPKDTLMISRTPEVTCVVVDVSHEDPEVKFNWYVDGVEVHNAKTKPREEQYNSTYRVVSVLTVLHQDWLNGKEYKCKVSNKALPAPIEKTISKAKGQPREPQVYTLPPSREEMTKNQVSLTCLVKGFYPSDIAVEWESNGQPENNYKTTPPMLDSDGSFFLYSKLTVDKSRWQQGNVFSCSVMHEALHNHYTQKSLSLSPGK

SEQ ID NO: 113 - protein, 326 aa, Artificial Sequence
  Synthetic: G1-G2.3-G1-G1-KH
ASTKGPSVFPLAPSSKSTSGGTAALGCLVKDYFPEPVTVSWNSGALTSGVHTFPAVLQSSGLYSLSSVVTVPSSSLGTQTYICNVNHKPSNTKVDKRVEPKSCVECPPCPAPPVAGPSVFLFPPKPKDTLMISRTPEVTCVVVDVSHEDPEVKFNWYVDGVEVHNAKTKPREEQYNSTYRVVSVLTVLHQDWLNGKEYKCKVSNKALPAPIEKTISKAKGQPREPQVYTLPPSREEMTKNQVSLTCLVKGFYPSDIAVEWESNGQPENNYKTTPPVLDSDGSFFLYSKLTVDKSRWQQGNVFSCSVMHEALHNHYTQKSLSLSPGK

SEQ ID NO: 114 - protein, 330 aa, Artificial Sequence
  Synthetic: G2-G1-G2-G2-AY
ASTKGPSVFPLAPCSRSTSESTAALGCLVKDYFPEPVTVSWNSGALTSGVHTFPAVLQSSGLYSLSSVVTVPSSNFGTQTYTCNVDHKPSNTKVDKTVERKSCDKTHTCPPCPAPELLGGPSVFLFPPKPKDTLMISRTPEVTCVVVDVSHEDPEVQFNWYVDGVEVHNAKTKPREEQFNSTFRVVSVLTVVHQDWLNGKEYKCKVSNKGLPAPIEKTISKTKGQPREPQVYTLPPSREEMTKNQVSLTCLVKGFYPSDIAVEWESNGQPENNYKTTPPMLDSDGSFFLYSKLTVDKSRWQQGNVFSCSVMHEALHNHYTQKSLSLSPGK

SEQ ID NO: 115 - protein, 330 aa, Artificial Sequence
  Synthetic: G2.5-G1-G2-G2-AY
ASTKGPSVFPLAPSSRSTSESTAALGCLVKDYFPEPVTVSWNSGALTSGVHTFPAVLQSSGLYSLSSVVTVPSSNFGTQTYTCNVDHKPSNTKVDKTVERKSCDKTHTCPPCPAPELLGGPSVFLFPPKPKDTLMISRTPEVTCVVVDVSHEDPEVQFNWYVDGVEVHNAKTKPREEQFNSTFRVVSVLTVVHQDWLNGKEYKCKVSNKGLPAPIEKTISKTKGQPREPQVYTLPPSREEMTKNQVSLTCLVKGFYPSDIAVEWESNGQPENNYKTTPPMLDSDGSFFLYSKLTVDKSRWQQGNVFSCSVMHEALHNHYTQKSLSLSPGK

SEQ ID NO: 116 - protein, 327 aa, Artificial Sequence
  Synthetic: G1-G2-G1-G1-AY
ASTKGPSVFPLAPSSKSTSGGTAALGCLVKDYFPEPVTVSWNSGALTSGVHTFPAVLQSSGLYSLSSVVTVPSSSLGTQTYICNVNHKPSNTKVDKRVEPKSCVECPPCPAPELLGGPSVFLFPPKPKDTLMISRTPEVTCVVVDVSHEDPEVKFNWYVDGVEVHNAKTKPREEQYNSTYRVVSVLTVLHQDWLNGKEYKCKVSNKALPAPIEKTISKAKGQPREPQVYTLPPSREEMTKNQVSLTCLVKGFYPSDIAVEWESNGQPENNYKTTPPVLDSDGSFFLYSKLTVDKSRWQQGNVFSCSVMHEALHNHYTQKSLSLSPGK

SEQ ID NO: 117 - protein, 328 aa, Artificial Sequence
  Synthetic: G2-G1-G2-G2-KH
ASTKGPSVFPLAPCSRSTSESTAALGCLVKDYFPEPVTVSWNSGALTSGVHTFPAVLQSSGLYSLSSVVTVPSSNFGTQTYTCNVDHKPSNTKVDKTVERKSCDKTHTCPPCPAPPVAGPSVFLFPPKPKDTLMISRTPEVTCVVVDVSHEDPEVQFNWYVDGVEVHNAKTKPREEQFNSTFRVVSVLTVVHQDWLNGKEYKCKVSNKGLPAPIEKTISKTKGQPREPQVYTLPPSREEMTKNQVSLTCLVKGFYPSDIAVEWESNGQPENNYKTTPPMLDSDGSFFLYSKLTVDKSRWQQGNVFSCSVMHEALHNHYTQKSLSLSPG

SEQ ID NO: 118 - protein, 329 aa, Artificial Sequence
  Synthetic: G2.5-G1-G2-G2-KH
ASTKGPSVFPLAPSSRSTSESTAALGCLVKDYFPEPVTVSWNSGALTSGVHTFPAVLQSSGLYSLSSVVTVPSSNFGTQTYTCNVDHKPSNTKVDKTVERKSCDKTHTCPPCPAPPVAGPSVFLFPPKPKDTLMISRTPEVTCVVVDVSHEDPEVQFNWYVDGVEVHNAKTKPREEQFNSTFRVVSVLTVVHQDWLNGKEYKCKVSNKGLPAPIEKTISKTKGQPREPQVYTLPPSREEMTKNQVSLTCLVKGFYPSDIAVEWESNGQPENNYKTTPPMLDSDGSFFLYSKLTVDKSRWQQGNVFSCSVMHEALHNHYTQKSLSLSPGK

SEQ ID NO: 119 - protein, 323 aa, Artificial Sequence
  Synthetic: IgG1-deltaHinge
ASTKGPSVFPLAPSSKSTSGGTAALGCLVKDYFPEPVTVSWNSGALTSGVHTFPAVLQSSGLYSLSSVVTVPSSSLGTQTYICNVNHKPSNTKVDKRVEPKCPPCPAPELLGGPSVFLFPPKPKDTLMISRTPEVTCVVVDVSHEDPEVKFNWYVDGVEVHNAKTKPREEQYNSTYRVVSVLTVLHQDWLNGKEYKCKVSNKALPAPIEKTISKAKGQPREPQVYTLPPSREEMTKNQVSLTCLVKGFYPSDIAVEWESNGQPENNYKTTPPVLDSDGSFFLYSKLTVDKSRWQQGNVFSCSVMHEALHNHYTQKSLSLSPGK

SEQ ID NO: 120 - protein, 322 aa, Artificial Sequence
  Synthetic: IgG2-deltaHinge
ASTKGPSVFPLAPCSRSTSESTAALGCLVKDYFPEPVTVSWNSGALTSGVHTFPAVLQSSGLYSLSSVVTVPSSNFGTQTYTCNVDHKPSNTKVDKTVERKCPPCPAPPVAGPSVFLFPPKPKDTLMISRTPEVTCVVVDVSHEDPEVQFNWYVDGVEVHNAKTKPREEQFNSTFRVVSVLTVVHQDWLNGKEYKCKVSNKGLPAPIEKTISKTKGQPREPQVYTLPPSREEMTKNQVSLTCLVKGFYPSDIAVEWESNGQPENNYKTTPPMLDSDGSFFLYSKLTVDKSRWQQGNVFSCSVMHEALHNHYTQKSLSLSPGK

SEQ ID NO: 121 - protein, 322 aa, Artificial Sequence
  Synthetic: IgG2.5-deltaHinge
ASTKGPSVFPLAPSSRSTSESTAALGCLVKDYFPEPVTVSWNSGALTSGVHTFPAVLQSSGLYSLSSVVTVPSSNFGTQTYTCNVDHKPSNTKVDKTVERKCPPCPAPPVAGPSVFLFPPKPKDTLMISRTPEVTCVVVDVSHEDPEVQFNWYVDGVEVHNAKTKPREEQFNSTFRVVSVLTVVHQDWLNGKEYKCKVSNKGLPAPIEKTISKTKGQPREPQVYTLPPSREEMTKNQVSLTCLVKGFYPSDIAVEWESNGQPENNYKTTPPMLDSDGSFFLYSKLTVDKSRWQQGNVFSCSVMHEALHNHYTQKSLSLSPGK

SEQ ID NO: 122 - protein, 328 aa, Artificial Sequence
  Synthetic: IgG1-deltaG237
ASTKGPSVFPLAPSSKSTSGGTAALGCLVKDYFPEPVTVSWNSGALTSGVHTFPAVLQSSGLYSLSSVVTVPSSSLGTQTYICNVNHKPSNTKVDKRVEPKSCDKTHTCPPCPAPELLGPSVFLFPPKPKDTLMISRTPEVTCVVVDVSHEDPEVKFNWYVDGVEVHNAKTKPREEQYNSTYRVVSVLTVLHQDWLNGKEYKCKVSNKALPAPIEKTISKAKGQPREPQVYTLPPSREEMTKNQVSLTCLVKGFYPSDIAVEWESNGQPENNYKTTPPVLDSDGSFFLYSKLTVDKSRWQQGNVFSCSVMHEALHNHYTQKSLSLSPG

SEQ ID NO: 123 - protein, 327 aa, Artificial Sequence
  Synthetic: IgG2-plusG237
ASTKGPSVFPLAPCSRSTSESTAALGCLVKDYFPEPVTVSWNSGALTSGVHTFPAVLQSSGLYSLSSVVTVPSSNFGTQTYTCNVDHKPSNTKVDKTVERKSCVECPPCPAPPVAGGPSVFLFPPKPKDTLMISRTPEVTCVVVDVSHEDPEVQFNWYVDGVEVHNAKTKPREEQFNSTFRVVSVLTVVHQDWLNGKEYKCKVSNKGLPAPIEKTISKTKGQPREPQVYTLPPSREEMTKNQVSLTCLVKGFYPSDIAVEWESNGQPENNYKTTPPMLDSDGSFFLYSKLTVDKSRWQQGNVFSCSVMHEALHNHYTQKSLSLSPGK

SEQ ID NO: 124 - protein, 326 aa, Artificial Sequence
  Synthetic: IgG2.4
ASTKGPSVFPLAPCSRSTSESTAALGCLVKDYFPEPVTVSWNSGALTSGVHTFPAVLQSSGLYSLSSVVTVPSSNFGTQTYTCNVDHKPSNTKVDKTVERKCSVECPPCPAPPVAGPSVFLFPPKPKDTLMISRTPEVTCVVVDVSHEDPEVQFNWYVDGVEVHNAKTKPREEQFNSTFRVVSVLTVVHQDWLNGKEYKCKVSNKGLPAPIEKTISKTKGQPREPQVYTLPPSREEMTKNQVSLTCLVKGFYPSDIAVEWESNGQPENNYKTTPPMLDSDGSFFLYSKLTVDKSRWQQGNVFSCSVMHEALHNHYTQKSLSLSPGK

SEQ ID NO: 125 - protein, 326 aa, Artificial Sequence
  Synthetic: IgG2.3/4
ASTKGPSVFPLAPCSRSTSESTAALGCLVKDYFPEPVTVSWNSGALTSGVHTFPAVLQSSGLYSLSSVVTVPSSNFGTQTYTCNVDHKPSNTKVDKTVERKSSVECPPCPAPPVAGPSVFLFPPKPKDTLMISRTPEVTCVVVDVSHEDPEVQFNWYVDGVEVHNAKTKPREEQFNSTFRVVSVLTVVHQDWLNGKEYKCKVSNKGLPAPIEKTISKTKGQPREPQVYTLPPSREEMTKNQVSLTCLVKGFYPSDIAVEWESNGQPENNYKTTPPMLDSDGSFFLYSKLTVDKSRWQQGNVFSCSVMHEALHNHYTQKSLSLSPGK

SEQ ID NO: 126 - protein, 18 aa, Artificial Sequence
  Synthetic: Hinge IgG2 C220S
ERKCSVECPPCPAPPVAG

SEQ ID NO: 127 - protein, 19 aa, Artificial Sequence
  Synthetic: IgG2/IgG1 hybrid hinge C220S
ERKCSVECPPCPAPELLGG

SEQ ID NO: 128 - protein, 14 aa, Artificial Sequence
  Synthetic: Wildtype IgG2 hinge portion
ERKCCVECPPCPAP

SEQ ID NO: 129 - protein, 14 aa, Artificial Sequence
  Synthetic: IgG2 hinge portion C219X
  misc_feature (4)..(4): Xaa is any amino acid except cysteine
ERKXCVECPPCPAP

SEQ ID NO: 130 - protein, 14 aa, Artificial Sequence
  Synthetic: IgG2 hinge portion C220X
  misc_feature (5)..(5): Xaa is any amino acid except cysteine
ERKCXVECPPCPAP

SEQ ID NO: 131 - protein, 14 aa, Artificial Sequence
  Synthetic: IgG2 hinge portion C219S
ERKSCVECPPCPAP

SEQ ID NO: 132 - protein, 14 aa, Artificial Sequence
  Synthetic: IgG2 hinge portion C220S
ERKCSVECPPCPAP

SEQ ID NO: 133 - protein, 116 aa, Artificial Sequence
  Synthetic: IgG2 CH1+IgG2 hinge (wildtype)
ASTKGPSVFPLAPCSRSTSESTAALGCLVKDYFPEPVTVSWNSGALTSGVHTFPAVLQSSGLYSLSSVVTVPSSNFGTQTYTCNVDHKPSNTKVDKTVERKCCVECPPCPAPPVAG

SEQ ID NO: 134 - protein, 18 aa, Artificial Sequence
  Synthetic: IgG2 with C219X
  misc_feature (4)..(4): Xaa can be any naturally occurring amino acid
ERKXCVECPPCPAPPVAG

SEQ ID NO: 135 - protein, 18 aa, Artificial Sequence
  Synthetic: IgG2 with C220X
  misc_feature (5)..(5): Xaa can be any naturally occurring amino acid
ERKCXVECPPCPAPPVAG

SEQ ID NO: 136 - protein, 19 aa, Artificial Sequence
  Synthetic: IgG2/IgG1 hybrid with C219X
  misc_feature (4)..(4): Xaa can be any naturally occurring amino acid
ERKXCVECPPCPAPELLGG

SEQ ID NO: 137 - protein, 18 aa, Artificial Sequence
  Synthetic: IgG2/IgG1 hybrid with C220X
ERKCVECPPCPAPELLGG

SEQ ID NO: 138 - protein, 18 aa, Artificial Sequence
  Synthetic: IgG2/IgG1 hybrid deltaG
ERKCCVECPPCPAPELLG

SEQ ID NO: 139 - protein, 18 aa, Artificial Sequence
  Synthetic: IgG2/IgG1 hybrid with C219S deltaG
ERKSCVECPPCPAPELLG

SEQ ID NO: 140 - protein, 18 aa, Artificial Sequence
  Synthetic: IgG2/IgG1 hybrid with C220S deltaG
ERKCSVECPPCPAPELLG

SEQ ID NO: 141 - protein, 18 aa, Artificial Sequence
  Synthetic: IgG2/IgG1 hybrid with C219X deltaG
  misc_feature (4)..(4): Xaa can be any naturally occurring amino acid
ERKXCVECPPCPAPELLG

SEQ ID NO: 142 - protein, 18 aa, Artificial Sequence
  Synthetic: IgG2/IgG1 hybrid with C220X deltaG
  misc_feature (5)..(5): Xaa can be any naturally occurring amino acid
ERKCXVECPPCPAPELLG

SEQ ID NO: 143 - protein, 19 aa, Artificial Sequence
  Synthetic: Wildtype IgG2 with C-terminal X
  misc_feature (19)..(19): Xaa can be any naturally occurring amino acid
ERKCCVECPPCPAPPVAGX

SEQ ID NO: 144 - protein, 19 aa, Artificial Sequence
  Synthetic: IgG2 with C219S with C-terminal X
  misc_feature (19)..(19): Xaa can be any naturally occurring amino acid
ERKSCVECPPCPAPPVAGX

SEQ ID NO: 145 - protein, 19 aa, Artificial Sequence
  Synthetic: IgG2 with C220S with C-terminal X
  misc_feature (19)..(19): Xaa can be any naturally occurring amino acid
ERKCSVECPPCPAPPVAGX

SEQ ID NO: 146 - protein, 19 aa, Artificial Sequence
  Synthetic: IgG2 with C219X with C-terminal X
  misc_feature (4)..(4): Xaa can be any naturally occurring amino acid
  misc_feature (19)..(19): Xaa can be any naturally occurring amino acid
ERKXCVECPPCPAPPVAGX

SEQ ID NO: 147 - protein, 19 aa, Artificial Sequence
  Synthetic: IgG2 with C220X with C-terminal X
  misc_feature (5)..(5): Xaa can be any naturally occurring amino acid
  misc_feature (19)..(19): Xaa can be any naturally occurring amino acid
ERKCXVECPPCPAPPVAGX

SEQ ID NO: 148 - protein, 4 aa, Artificial Sequence
  Synthetic: IgG2 hinge portion
PVAG

SEQ ID NO: 149 - protein, 7 aa, Artificial Sequence
  Synthetic: IgG1 hinge portion
SCDKTHT

SEQ ID NO: 150 - protein, 4 aa, Artificial Sequence
  Synthetic: IgG1 hinge portion 1
ELLG

SEQ ID NO: 151 - protein, 5 aa, Artificial Sequence
  Synthetic: IgG1 hinge portion 2
ELLGG

SEQ ID NO: 152 - protein, 326 aa, Artificial Sequence
  Synthetic: IgG2.3-V13
ASTKGPSVFPLAPCSRSTSESTAALGCLVKDYFPEPVTVSWNSGALTSGVHTFPAVLQSSGLYSLSSVVTVPSSNFGTQTYTCNVDHKPSNTKVDKTVERKSCVECPPCPAPPVAGDSVFLFPPKPKDTLMISRTPEVTCVVVDVSHEDPEVQFNWYVDGVEVHNAKTKPREEQFNSTFRVVSVLTVVHQDWLNGKEYKCKVSNKGLPAPIEKTISKTKGQPREPQVYTLPPSREEMTKNQVSLTCLVKGFYPSDIAVEWESNGQPENNYKTTPPMLDSDGSFFLYSKLTVDKSRWQQGNVFSCSVMHEALHNHYTQKSLSLSPGK

SEQ ID NO: 153 - protein, 326 aa, Artificial Sequence
  Synthetic: IgG2.3-V14
ASTKGPSVFPLAPCSRSTSESTAALGCLVKDYFPEPVTVSWNSGALTSGVHTFPAVLQSSGLYSLSSVVTVPSSNFGTQTYTCNVDHKPSNTKVDKTVERKSCVECPPCPAPPVAGDSVFLFPPKPKDTLMISRTPEVTCVVVDVSHEDGEVQFNWYVDGVEVHNAKTKPREEQFNSTFRVVSVLTVVHQDWLNGKEYKCKVSNKGLPAPIEKTISKTKGQPREPQVYTLPPSREEMTKNQVSLTCLVKGFYPSDIAVEWESNGQPENNYKTTPPMLDSDGSFFLYSKLTVDKSRWQQGNVFSCSVMHEALHNHYTQKSLSLSPGK

SEQ ID NO: 154 - protein, 326 aa, Artificial Sequence
  Synthetic: IgG2.3-V15
ASTKGPSVFPLAPCSRSTSESTAALGCLVKDYFPEPVTVSWNSGALTSGVHTFPAVLQSSGLYSLSSVVTVPSSNFGTQTYTCNVDHKPSNTKVDKTVERKSCVECPPCPAPPVAGDSVFLFPPKPKDTLMISRTPEVTCVVVDVSDEDGEVQFNWYVDGVEVHNAKTKPREEQFNSTFRVVSVLTVVHQDWLNGKEYKCKVSNKGLPAPIEKTISKTKGQPREPQVYTLPPSREEMTKNQVSLTCLVKGFYPSDIAVEWESNGQPENNYKTTPPMLDSDGSFFLYSKLTVDKSRWQQGNVFSCSVMHEALHNHYTQKSLSLSPGK

SEQ ID NO: 155 - protein, 326 aa, Artificial Sequence
  Synthetic: IgG2.3-V16
ASTKGPSVFPLAPCSRSTSESTAALGCLVKDYFPEPVTVSWNSGALTSGVHTFPAVLQSSGLYSLSSVVTVPSSNFGTQTYTCNVDHKPSNTKVDKTVERKSCVECPPCPAPPVAGDSVFLFPPKPKDTLMISRTPEVTCVVVDVSHEDGEVQFNWYVDGVEVHNAKTKPREEQFNSTFRVVSVLTVVHQDWLNGKEYKCKVSNKGLPRPIEKTISKTKGQPREPQVYTLPPSREEMTKNQVSLTCLVKGFYPSDIAVEWESNGQPENNYKTTPPMLDSDGSFFLYSKLTVDKSRWQQGNVFSCSVMHEALHNHYTQKSLSLSPGK

SEQ ID NO: 156 - protein, 326 aa, Artificial Sequence
  Synthetic: IgG2.3-V17
ASTKGPSVFPLAPCSRSTSESTAALGCLVKDYFPEPVTVSWNSGALTSGVHTFPAVLQSSGLYSLSSVVTVPSSNFGTQTYTCNVDHKPSNTKVDKTVERKSCVECPPCPAPPVAGDSVFLFPPKPKDTLMISRTPEVTCVVVDVSDEDGEVQFNWYVDGVEVHNAKTKPREEQFNSTFRVVSVLTVVHQDWLNGKEYKCKVSNKGLPRPIEKTISKTKGQPREPQVYTLPPSREEMTKNQVSLTCLVKGFYPSDIAVEWESNGQPENNYKTTPPMLDSDGSFFLYSKLTVDKSRWQQGNVFSCSVMHEALHNHYTQKSLSLSPGK

SEQ ID NO: 157 - protein, 326 aa, Artificial Sequence
  Synthetic: IgG2.3-V18
ASTKGPSVFPLAPCSRSTSESTAALGCLVKDYFPEPVTVSWNSGALTSGVHTFPAVLQSSGLYSLSSVVTVPSSNFGTQTYTCNVDHKPSNTKVDKTVERKSCVECPPCPAPPVAGPSVFLFPPKPKDTLMISRTPEVTCVVVDVEHEDPEVQFNWYVDGVEVHNAKTKPREEQFNSTFRVVSVLTVVHQDWLNGKEYKCKVSNKGLPAPIEKTISKTKGQPREPQVYTLPPSREEMTKNQVSLTCLVKGFYPSDIAVEWESNGQPENNYKTTPPMLDSDGSFFLYSKLTVDKSRWQQGNVFSCSVMHEALHNHYTQKSLSLSPGK

SEQ ID NO: 158 - protein, 326 aa, Artificial Sequence
  Synthetic: IgG2.3-V19
ASTKGPSVFPLAPCSRSTSESTAALGCLVKDYFPEPVTVSWNSGALTSGVHTFPAVLQSSGLYSLSSVVTVPSSNFGTQTYTCNVDHKPSNTKVDKTVERKSCVECPPCPAPPVAGPSVFLFPPKPKDTLMISRTPEVTCVVVDVEHEDPEVQFNWYVDGVEVHNAKTKPREEQFNSTFRVVSVLTVVHQDWLNGKEYKCKVSNKGFPAPIEKTISKTKGQPREPQVYTLPPSREEMTKNQVSLTCLVKGFYPSDIAVEWESNGQPENNYKTTPPMLDSDGSFFLYSKLTVDKSRWQQGNVFSCSVMHEALHNHYTQKSLSLSPGK

SEQ ID NO: 159 - protein, 327 aa, Artificial Sequence; identical to SEQ ID NO: 80
  Synthetic: IgG2.3G1

SEQ ID NO: 160 - protein, 327 aa, Artificial Sequence
  Synthetic: IgG2.3G1-V20
ASTKGPSVFPLAPCSRSTSESTAALGCLVKDYFPEPVTVSWNSGALTSGVHTFPAVLQSSGLYSLSSVVTVPSSNFGTQTYTCNVDHKPSNTKVDKTVERKSCVECPPCPAPELLGGDSVFLFPPKPKDTLMISRTPEVTCVVVDVSHEDPEVKFNWYVDGVEVHNAKTKPREEQYNSTYRVVSVLTVLHQDWLNGKEYKCKVSNKALPAPIEKTISKAKGQPREPQVYTLPPSREEMTKNQVSLTCLVKGFYPSDIAVEWESNGQPENNYKTTPPVLDSDGSFFLYSKLTVDKSRWQQGNVFSCSVMHEALHNHYTQKSLSLSPGK

SEQ ID NO: 161 - protein, 327 aa, Artificial Sequence
  Synthetic: IgG2.3G1-V21
ASTKGPSVFPLAPCSRSTSESTAALGCLVKDYFPEPVTVSWNSGALTSGVHTFPAVLQSSGLYSLSSVVTVPSSNFGTQTYTCNVDHKPSNTKVDKTVERKSCVECPPCPAPELLGGDSVFLFPPKPKDTLMISRTPEVTCVVVDVSHEDGEVKFNWYVDGVEVHNAKTKPREEQYNSTYRVVSVLTVLHQDWLNGKEYKCKVSNKALPAPIEKTISKAKGQPREPQVYTLPPSREEMTKNQVSLTCLVKGFYPSDIAVEWESNGQPENNYKTTPPVLDSDGSFFLYSKLTVDKSRWQQGNVFSCSVMHEALHNHYTQKSLSLSPGK

SEQ ID NO: 162 - protein, 327 aa, Artificial Sequence
  Synthetic: IgG2.3G1-V22
ASTKGPSVFPLAPCSRSTSESTAALGCLVKDYFPEPVTVSWNSGALTSGVHTFPAVLQSSGLYSLSSVVTVPSSNFGTQTYTCNVDHKPSNTKVDKTVERKSCVECPPCPAPELLGGDSVFLFPPKPKDTLMISRTPEVTCVVVDVSDEDGEVKFNWYVDGVEVHNAKTKPREEQYNSTYRVVSVLTVLHQDWLNGKEYKCKVSNKALPAPIEKTISKAKGQPREPQVYTLPPSREEMTKNQVSLTCLVKGFYPSDIAVEWESNGQPENNYKTTPPVLDSDGSFFLYSKLTVDKSRWQQGNVFSCSVMHEALHNHYTQKSLSLSPGK

SEQ ID NO: 163 - protein, 327 aa, Artificial Sequence
  Synthetic: IgG2.3G1-V23
ASTKGPSVFPLAPCSRSTSESTAALGCLVKDYFPEPVTVSWNSGALTSGVHTFPAVLQSSGLYSLSSVVTVPSSNFGTQTYTCNVDHKPSNTKVDKTVERKSCVECPPCPAPELLGGDSVFLFPPKPKDTLMISRTPEVTCVVVDVSHEDGEVKFNWYVDGVEVHNAKTKPREEQYNSTYRVVSVLTVLHQDWLNGKEYKCKVSNKALPRPIEKTISKAKGQPREPQVYTLPPSREEMTKNQVSLTCLVKGFYPSDIAVEWESNGQPENNYKTTPPVLDSDGSFFLYSKLTVDKSRWQQGNVFSCSVMHEALHNHYTQKSLSLSPGK

SEQ ID NO: 164 - protein, 327 aa, Artificial Sequence
  Synthetic: IgG2.3G1-V24
ASTKGPSVFPLAPCSRSTSESTAALGCLVKDYFPEPVTVSWNSGALTSGVHTFPAVLQSSGLYSLSSVVTVPSSNFGTQTYTCNVDHKPSNTKVDKTVERKSCVECPPCPAPELLGGDSVFLFPPKPKDTLMISRTPEVTCVVVDVSDEDGEVKFNWYVDGVEVHNAKTKPREEQYNSTYRVVSVLTVLHQDWLNGKEYKCKVSNKALPRPIEKTISKAKGQPREPQVYTLPPSREEMTKNQVSLTCLVKGFYPSDIAVEWESNGQPENNYKTTPPVLDSDGSFFLYSKLTVDKSRWQQGNVFSCSVMHEALHNHYTQKSLSLSPGK

SEQ ID NO: 165 - protein, 327 aa, Artificial Sequence
  Synthetic: IgG2.3G1-V25
ASTKGPSVFPLAPCSRSTSESTAALGCLVKDYFPEPVTVSWNSGALTSGVHTFPAVLQSSGLYSLSSVVTVPSSNFGTQTYTCNVDHKPSNTKVDKTVERKSCVECPPCPAPELLGDDSVFLFPPKPKDTLMISRTPEVTCVVVDVSDEDGEVKFNWYVDGVEVHNAKTKPREEQYNSTYRVVSVLTVLHQDWLNGKEYKCKVSNKALPRPIEKTISKAKGQPREPQVYTLPPSREEMTKNQVSLTCLVKGFYPSDIAVEWESNGQPENNYKTTPPVLDSDGSFFLYSKLTVDKSRWQQGNVFSCSVMHEALHNHYTQKSLSLSPGK

SEQ ID NO: 166 - protein, 327 aa, Artificial Sequence
  Synthetic: IgG2.3G1-V26
ASTKGPSVFPLAPCSRSTSESTAALGCLVKDYFPEPVTVSWNSGALTSGVHTFPAVLQSSGLYSLSSVVTVPSSNFGTQTYTCNVDHKPSNTKVDKTVERKSCVECPPCPAPDLLGDDSVFLFPPKPKDTLMISRTPEVTCVVVDVSDEDGEVKFNWYVDGVEVHNAKTKPREEQYNSTYRVVSVLTVLHQDWLNGKEYKCKVSNKALPRPIEKTISKAKGQPREPQVYTLPPSREEMTKNQVSLTCLVKGFYPSDIAVEWESNGQPENNYKTTPPVLDSDGSFFLYSKLTVDKSRWQQGNVFSCSVMHEALHNHYTQKSLSLSPGK

SEQ ID NO: 167 - protein, 327 aa, Artificial Sequence
  Synthetic: IgG2.3G1-V27
ASTKGPSVFPLAPCSRSTSESTAALGCLVKDYFPEPVTVSWNSGALTSGVHTFPAVLQSSGLYSLSSVVTVPSSNFGTQTYTCNVDHKPSNTKVDKTVERKSCVECPPCPAPELLGGPSVFLFPPKPKDTLMISRTPEVTCVVVDVEHEDPEVKFNWYVDGVEVHNAKTKPREEQYNSTYRVVSVLTVLHQDWLNGKEYKCKVSNKALPAPIEKTISKAKGQPREPQVYTLPPSREEMTKNQVSLTCLVKGFYPSDIAVEWESNGQPENNYKTTPPVLDSDGSFFLYSKLTVDKSRWQQGNVFSCSVMHEALHNHYTQKSLSLSPGK

SEQ ID NO: 168 - protein, 327 aa, Artificial Sequence
  Synthetic: IgG2.3G1-V28
ASTKGPSVFPLAPCSRSTSESTAALGCLVKDYFPEPVTVSWNSGALTSGVHTFPAVLQSSGLYSLSSVVTVPSSNFGTQTYTCNVDHKPSNTKVDKTVERKSCVECPPCPAPELLGGPSVFLFPPKPKDTLMISRTPEVTCVVVDVEHEDPEVKFNWYVDGVEVHNAKTKPREEQYNSTYRVVSVLTVLHQDWLNGKEYKCKVSNKAFPAPIEKTISKAKGQPREPQVYTLPPSREEMTKNQVSLTCLVKGFYPSDIAVEWESNGQPENNYKTTPPVLDSDGSFFLYSKLTVDKSRWQQGNVFSCSVMHEALHNHYTQKSLSLSPGK

SEQ ID NO: 169 - protein, 327 aa, Artificial Sequence
  Synthetic: IgG2.3G1-AY-V9-D270E
ASTKGPSVFPLAPCSRSTSESTAALGCLVKDYFPEPVTVSWNSGALTSGVHTFPAVLQSSGLYSLSSVVTVPSSNFGTQTYTCNVDHKPSNTKVDKTVERKSCVECPPCPAPELLGDDSVFLFPPKPKDTLMISRTPEVTCVVVDVSHEEGEVKFNWYVDGVEVHNAKTKPREEQYNSTYRVVSVLTVLHQDWLNGKEYKCKVSNKALPRPIEKTISKAKGQPREPQVYTLPPSREEMTKNQVSLTCLVKGFYPSDIAVEWESNGQPENNYKTTPPVLDSDGSFFLYSKLTVDKSRWQQGNVFSCSVMHEALHNHYTQKSLSLSPGK

SEQ ID NO: 170 - protein, 327 aa, Artificial Sequence; identical to SEQ ID NO: 165
  Synthetic: IgG2.3G1-AY-V11

SEQ ID NO: 171 - protein, 327 aa, Artificial Sequence
  Synthetic: IgG2.5G1-AY-V9-D270E
ASTKGPSVFPLAPSSRSTSESTAALGCLVKDYFPEPVTVSWNSGALTSGVHTFPAVLQSSGLYSLSSVVTVPSSNFGTQTYTCNVDHKPSNTKVDKTVERKCCVECPPCPAPELLGDDSVFLFPPKPKDTLMISRTPEVTCVVVDVSHEEGEVKFNWYVDGVEVHNAKTKPREEQYNSTYRVVSVLTVLHQDWLNGKEYKCKVSNKALPRPIEKTISKAKGQPREPQVYTLPPSREEMTKNQVSLTCLVKGFYPSDIAVEWESNGQPENNYKTTPPVLDSDGSFFLYSKLTVDKSRWQQGNVFSCSVMHEALHNHYTQKSLSLSPGK

SEQ ID NO: 172 - protein, 327 aa, Artificial Sequence
  Synthetic: IgG2.5G1-AY-V11
ASTKGPSVFPLAPSSRSTSESTAALGCLVKDYFPEPVTVSWNSGALTSGVHTFPAVLQSSGLYSLSSVVTVPSSNFGTQTYTCNVDHKPSNTKVDKTVERKCCVECPPCPAPELLGDDSVFLFPPKPKDTLMISRTPEVTCVVVDVSDEDGEVKFNWYVDGVEVHNAKTKPREEQYNSTYRVVSVLTVLHQDWLNGKEYKCKVSNKALPRPIEKTISKAKGQPREPQVYTLPPSREEMTKNQVSLTCLVKGFYPSDIAVEWESNGQPENNYKTTPPVLDSDGSFFLYSKLTVDKSRWQQGNVFSCSVMHEALHNHYTQKSLSLSPGK

SEQ ID NO: 173 - protein, 330 aa, Artificial Sequence
  Synthetic: IgG1f-GASDALIE
ASTKGPSVFPLAPSSKSTSGGTAALGCLVKDYFPEPVTVSWNSGALTSGVHTFPAVLQSSGLYSLSSVVTVPSSSLGTQTYICNVNHKPSNTKVDKRVEPKSCDKTHTCPPCPAPELLAGPDVFLFPPKPKDTLMISRTPEVTCVVVDVSHEDPEVKFNWYVDGVEVHNAKTKPREEQYNSTYRVVSVLTVLHQDWLNGKEYKCKVSNKALPLPEEKTISKAKGQPREPQVYTLPPSREEMTKNQVSLTCLVKGFYPSDIAVEWESNGQPENNYKTTPPVLDSDGSFFLYSKLTVDKSRWQQGNVFSCSVMHEALHNHYTQKSLSLSPGK

SEQ ID NO: 174 - protein, 330 aa, Artificial Sequence
  Synthetic: IgG1f-G236A
ASTKGPSVFPLAPSSKSTSGGTAALGCLVKDYFPEPVTVSWNSGALTSGVHTFPAVLQSSGLYSLSSVVTVPSSSLGTQTYICNVNHKPSNTKVDKRVEPKSCDKTHTCPPCPAPELLAGPSVFLFPPKPKDTLMISRTPEVTCVVVDVSHEDPEVKFNWYVDGVEVHNAKTKPREEQYNSTYRVVSVLTVLHQDWLNGKEYKCKVSNKALPAPIEKTISKAKGQPREPQVYTLPPSREEMTKNQVSLTCLVKGFYPSDIAVEWESNGQPENNYKTTPPVLDSDGSFFLYSKLTVDKSRWQQGNVFSCSVMHEALHNHYTQKSLSLSPGK

SEQ ID NO: 175 - protein, 327 aa, Artificial Sequence
  Synthetic: IgG2.3G1-AY-G236A
ASTKGPSVFPLAPCSRSTSESTAALGCLVKDYFPEPVTVSWNSGALTSGVHTFPAVLQSSGLYSLSSVVTVPSSNFGTQTYTCNVDHKPSNTKVDKTVERKSCVECPPCPAPELLAGPSVFLFPPKPKDTLMISRTPEVTCVVVDVSHEDPEVKFNWYVDGVEVHNAKTKPREEQYNSTYRVVSVLTVLHQDWLNGKEYKCKVSNKALPAPIEKTISKAKGQPREPQVYTLPPSREEMTKNQVSLTCLVKGFYPSDIAVEWESNGQPENNYKTTPPVLDSDGSFFLYSKLTVDKSRWQQGNVFSCSVMHEALHNHYTQKSLSLSPGK

SEQ ID NO: 176 - protein, 327 aa, Artificial Sequence
  Synthetic: IgG2.3G1-AY-GASDALIE
ASTKGPSVFPLAPCSRSTSESTAALGCLVKDYFPEPVTVSWNSGALTSGVHTFPAVLQSSGLYSLSSVVTVPSSNFGTQTYTCNVDHKPSNTKVDKTVERKSCVECPPCPAPELLAGPDVFLFPPKPKDTLMISRTPEVTCVVVDVSHEDPEVKFNWYVDGVEVHNAKTKPREEQYNSTYRVVSVLTVLHQDWLNGKEYKCKVSNKALPLPEEKTISKAKGQPREPQVYTLPPSREEMTKNQVSLTCLVKGFYPSDIAVEWESNGQPENNYKTTPPVLDSDGSFFLYSKLTVDKSRWQQGNVFSCSVMHEALHNHYTQKSLSLSPGK

SEQ ID NO: 177 - protein, 327 aa, Artificial Sequence
  Synthetic: IgG2.5G1-AY-G236A
ASTKGPSVFPLAPSSRSTSESTAALGCLVKDYFPEPVTVSWNSGALTSGVHTFPAVLQSSGLYSLSSVVTVPSSNFGTQTYTCNVDHKPSNTKVDKTVERKCCVECPPCPAPELLAGPSVFLFPPKPKDTLMISRTPEVTCVVVDVSHEDPEVKFNWYVDGVEVHNAKTKPREEQYNSTYRVVSVLTVLHQDWLNGKEYKCKVSNKALPAPIEKTISKAKGQPREPQVYTLPPSREEMTKNQVSLTCLVKGFYPSDIAVEWESNGQPENNYKTTPPVLDSDGSFFLYSKLTVDKSRWQQGNVFSCSVMHEALHNHYTQKSLSLSPGK

SEQ ID NO: 178 - protein, 326 aa, Artificial Sequence
  Synthetic: IgG2.5G1-AY-GASDALIE
STKGPSVFPLAPSSRSTSESTAALGCLVKDYFPEPVTVSWNSGALTSGVHTFPAVLQSSGLYSLSSVVTVPSSNFGTQTYTCNVDHKPSNTKVDKTVERKCCVECPPCPAPELLAGPDVFLFPPKPKDTLMISRTPEVTCVVVDVSHEDPEVKFNWYVDGVEVHNAKTKPREEQYNSTYRVVSVLTVLHQDWLNGKEYKCKVSNKALPLPEEKTISKAKGQPREPQVYTLPPSREEMTKNQVSLTCLVKGFYPSDIAVEWESNGQPENNYKTTPPVLDSDGSFFLYSKLTVDKSRWQQGNVFSCSVMHEALHNHYTQKSLSLSPGK

SEQ ID NO: 179 - protein, 327 aa, Artificial Sequence
  Synthetic: IgG2.3G1.1f-AY
ASTKGPSVFPLAPCSRSTSESTAALGCLVKDYFPEPVTVSWNSGALTSGVHTFPAVLQSSGLYSLSSVVTVPSSNFGTQTYTCNVDHKPSNTKVDKTVERKSCVECPPCPAPEAEGAPSVFLFPPKPKDTLMISRTPEVTCVVVDVSHEDPEVKFNWYVDGVEVHNAKTKPREEQYNSTYRVVSVLTVLHQDWLNGKEYKCKVSNKALPSSIEKTISKAKGQPREPQVYTLPPSREEMTKNQVSLTCLVKGFYPSDIAVEWESNGQPENNYKTTPPVLDSDGSFFLYSKLTVDKSRWQQGNVFSCSVMHEALHNHYTQKSLSLSPGK

SEQ ID NO: 180 - protein, 327 aa, Artificial Sequence
  Synthetic: IgG2.3G1.3f-AY
ASTKGPSVFPLAPCSRSTSESTAALGCLVKDYFPEPVTVSWNSGALTSGVHTFPAVLQSSGLYSLSSVVTVPSSNFGTQTYTCNVDHKPSNTKVDKTVERKSCVECPPCPAPEAEGAPSVFLFPPKPKDTLMISRTPEVTCVVVDVSHEDPEVKFNWYVDGVEVHNAKTKPREEQYNSTYRVVSVLTVLHQDWLNGKEYKCKVSNKALPAPIEKTISKAKGQPREPQVYTLPPSREEMTKNQVSLTCLVKGFYPSDIAVEWESNGQPENNYKTTPPVLDSDGSFFLYSKLTVDKSRWQQGNVFSCSVMHEALHNHYTQKSLSLSPGK

SEQ ID NO: 181 - protein, 327 aa, Artificial Sequence
  Synthetic: IgG2.3G1-AY-D265A
ASTKGPSVFPLAPCSRSTSESTAALGCLVKDYFPEPVTVSWNSGALTSGVHTFPAVLQSSGLYSLSSVVTVPSSNFGTQTYTCNVDHKPSNTKVDKTVERKSCVECPPCPAPELLGGPSVFLFPPKPKDTLMISRTPEVTCVVVAVSHEDPEVKFNWYVDGVEVHNAKTKPREEQYNSTYRVVSVLTVLHQDWLNGKEYKCKVSNKALPAPIEKTISKAKGQPREPQVYTLPPSREEMTKNQVSLTCLVKGFYPSDIAVEWESNGQPENNYKTTPPVLDSDGSFFLYSKLTVDKSRWQQGNVFSCSVMHEALHNHYTQKSLSLSPGK

SEQ ID NO: 182 - protein, 327 aa, Artificial Sequence
  Synthetic: IgG2.3G1-AY-N297A
ASTKGPSVFPLAPCSRSTSESTAALGCLVKDYFPEPVTVSWNSGALTSGVHTFPAVLQSSGLYSLSSVVTVPSSNFGTQTYTCNVDHKPSNTKVDKTVERKSCVECPPCPAPELLGGPSVFLFPPKPKDTLMISRTPEVTCVVVDVSHEDPEVKFNWYVDGVEVHNAKTKPREEQYASTYRVVSVLTVLHQDWLNGKEYKCKVSNKALPAPIEKTISKAKGQPREPQVYTLPPSREEMTKNQVSLTCLVKGFYPSDIAVEWESNGQPENNYKTTPPVLDSDGSFFLYSKLTVDKSRWQQGNVFSCSVMHEALHNHYTQKSLSLSPGK

SEQ ID NO: 183 - protein, 327 aa, Artificial Sequence
  Synthetic: IgG2.5G1.1f-AY
ASTKGPSVFPLAPSSRSTSESTAALGCLVKDYFPEPVTVSWNSGALTSGVHTFPAVLQSSGLYSLSSVVTVPSSNFGTQTYTCNVDHKPSNTKVDKTVERKCCVECPPCPAPEAEGAPSVFLFPPKPKDTLMISRTPEVTCVVVDVSHEDPEVKFNWYVDGVEVHNAKTKPREEQYNSTYRVVSVLTVLHQDWLNGKEYKCKVSNKALPSSIEKTISKAKGQPREPQVYTLPPSREEMTKNQVSLTCLVKGFYPSDIAVEWESNGQPENNYKTTPPVLDSDGSFFLYSKLTVDKSRWQQGNVFSCSVMHEALHNHYTQKSLSLSPGK

SEQ ID NO: 184 - protein, 327 aa, Artificial Sequence
  Synthetic: IgG2.5G1.3f-AY
ASTKGPSVFPLAPSSRSTSESTAALGCLVKDYFPEPVTVSWNSGALTSGVHTFPAVLQSSGLYSLSSVVTVPSSNFGTQTYTCNVDHKPSNTKVDKTVERKCCVECPPCPAPEAEGAPSVFLFPPKPKDTLMISRTPEVTCVVVDVSHEDPEVKFNWYVDGVEVHNAKTKPREEQYNSTYRVVSVLTVLHQDWLNGKEYKCKVSNKALPAPIEKTISKAKGQPREPQVYTLPPSREEMTKNQVSLTCLVKGFYPSDIAVEWESNGQPENNYKTTPPVLDSDGSFFLYSKLTVDKSRWQQGNVFSCSVMHEALHNHYTQKSLSLSPGK

SEQ ID NO: 185 - protein, 327 aa, Artificial Sequence
  Synthetic: IgG2.5G1-AY-D265A
ASTKGPSVFPLAPSSRSTSESTAALGCLVKDYFPEPVTVSWNSGALTSGVHTFPAVLQSSGLYSLSSVVTVPSSNFGTQTYTCNVDHKPSNTKVDKTVERKCCVECPPCPAPELLGGPSVFLFPPKPKDTLMISRTPEVTCVVVAVSHEDPEVKFNWYVDGVEVHNAKTKPREEQYNSTYRVVSVLTVLHQDWLNGKEYKCKVSNKALPAPIEKTISKAKGQPREPQVYTLPPSREEMTKNQVSLTCLVKGFYPSDIAVEWESNGQPENNYKTTPPVLDSDGSFFLYSKLTVDKSRWQQGNVFSCSVMHEALHNHYTQKSLSLSPGK

SEQ ID NO: 186 - protein, 327 aa, Artificial Sequence
  Synthetic: IgG2.5G1-AY-N297A
ASTKGPSVFPLAPSSRSTSESTAALGCLVKDYFPEPVTVSWNSGALTSGVHTFPAVLQSSGLYSLSSVVTVPSSNFGTQTYTCNVDHKPSNTKVDKTVERKCCVECPPCPAPELLGGPSVFLFPPKPKDTLMISRTPEVTCVVVDVSHEDPEVKFNWYVDGVEVHNAKTKPREEQYASTYRVVSVLTVLHQDWLNGKEYKCKVSNKALPAPIEKTISKAKGQPREPQVYTLPPSREEMTKNQVSLTCLVKGFYPSDIAVEWESNGQPENNYKTTPPVLDSDGSFFLYSKLTVDKSRWQQGNVFSCSVMHEALHNHYTQKSLSLSPGK

SEQ ID NO: 187 - protein, 330 aa, Artificial Sequence
  Synthetic: CT
ASTKGPSVFPLAPSSKSTSGGTAALGCLVKDYFPEPVTVSWNSGALTSGVHTFPAVLQSSGLYSLSSVVTVPSSSLGTQTYICNVNHKPSNTKVDKRVEPKSCDKTHTSPPSPAPELLGGSSVFLFPPKPKDTLMISRTPEVTCVVVDVSHEDPEVKFNWYVDGVEVHNAKTKPREEQYNSTYRVVSVLTVLHQDWLNGKEYKCKVSNKALPAPIEKTISKAKGQPREPQVYTLPPSRDELTKNQVSLTCLVKGFYPSDIAVEWESNGQPENNYKTTPPVLDSDGSFFLYSKLTVDKSRWQQGNVFSCSVMHEALHNHYTQKSLSLSPGK

SEQ ID NO: 188 - protein, 330 aa, Artificial Sequence
  Synthetic: CTf
ASTKGPSVFPLAPSSKSTSGGTAALGCLVKDYFPEPVTVSWNSGALTSGVHTFPAVLQSSGLYSLSSVVTVPSSSLGTQTYICNVNHKPSNTKVDKRVEPKSCDKTHTSPPSPAPELLGGSSVFLFPPKPKDTLMISRTPEVTCVVVDVSHEDPEVKFNWYVDGVEVHNAKTKPREEQYNSTYRVVSVLTVLHQDWLNGKEYKCKVSNKALPAPIEKTISKAKGQPREPQVYTLPPSREEMTKNQVSLTCLVKGFYPSDIAVEWESNGQPENNYKTTPPVLDSDGSFFLYSKLTVDKSRWQQGNVFSCSVMHEALHNHYTQKSLSLSPGK

SEQ ID NO: 189 - protein, 327 aa, Artificial Sequence
  Synthetic: IgG2.3-CT
ASTKGPSVFPLAPCSRSTSESTAALGCLVKDYFPEPVTVSWNSGALTSGVHTFPAVLQSSGLYSLSSVVTVPSSNFGTQTYTCNVDHKPSNTKVDKTVERKSCVESPPSPAPELLGGSSVFLFPPKPKDTLMISRTPEVTCVVVDVSHEDPEVKFNWYVDGVEVHNAKTKPREEQYNSTYRVVSVLTVLHQDWLNGKEYKCKVSNKALPAPIEKTISKAKGQPREPQVYTLPPSRDELTKNQVSLTCLVKGFYPSDIAVEWESNGQPENNYKTTPPVLDSDGSFFLYSKLTVDKSRWQQGNVFSCSVMHEALHNHYTQKSLSLSPGK

SEQ ID NO: 190 - protein, 327 aa, Artificial Sequence
  Synthetic: IgG2.5-CT
ASTKGPSVFPLAPSSRSTSESTAALGCLVKDYFPEPVTVSWNSGALTSGVHTFPAVLQSSGLYSLSSVVTVPSSNFGTQTYTCNVDHKPSNTKVDKTVERKCCVESPPSPAPELLGGSSVFLFPPKPKDTLMISRTPEVTCVVVDVSHEDPEVKFNWYVDGVEVHNAKTKPREEQYNSTYRVVSVLTVLHQDWLNGKEYKCKVSNKALPAPIEKTISKAKGQPREPQVYTLPPSRDELTKNQVSLTCLVKGFYPSDIAVEWESNGQPENNYKTTPPVLDSDGSFFLYSKLTVDKSRWQQGNVFSCSVMHEALHNHYTQKSLSLSPGK

SEQ ID NO: 191 - protein, 330 aa, Artificial Sequence
  Synthetic: IgG1fa-C226S
ASTKGPSVFPLAPSSKSTSGGTAALGCLVKDYFPEPVTVSWNSGALTSGVHTFPAVLQSSGLYSLSSVVTVPSSSLGTQTYICNVNHKPSNTKVDKRVEPKSCDKTHTSPPCPAPELLGGPSVFLFPPKPKDTLMISRTPEVTCVVVDVSHEDPEVKFNWYVDGVEVHNAKTKPREEQYNSTYRVVSVLTVLHQDWLNGKEYKCKVSNKALPAPIEKTISKAKGQPREPQVYTLPPSRDELTKNQVSLTCLVKGFYPSDIAVEWESNGQPENNYKTTPPVLDSDGSFFLYSKLTVDKSRWQQGNVFSCSVMHEALHNHYTQKSLSLSPGK

SEQ ID NO: 192 - protein, 330 aa, Artificial Sequence
  Synthetic: IgG1fa-C229S
ASTKGPSVFPLAPSSKSTSGGTAALGCLVKDYFPEPVTVSWNSGALTSGVHTFPAVLQSSGLYSLSSVVTVPSSSLGTQTYICNVNHKPSNTKVDKRVEPKSCDKTHTCPPSPAPELLGGPSVFLFPPKPKDTLMISRTPEVTCVVVDVSHEDPEVKFNWYVDGVEVHNAKTKPREEQYNSTYRVVSVLTVLHQDWLNGKEYKCKVSNKALPAPIEKTISKAKGQPREPQVYTLPPSRDELTKNQVSLTCLVKGFYPSDIAVEWESNGQPENNYKTTPPVLDSDGSFFLYSKLTVDKSRWQQGNVFSCSVMHEALHNHYTQKSLSLSPGK

SEQ ID NO: 193 - protein, 330 aa, Artificial Sequence
  Synthetic: IgG1fa-C226S,C229S
ASTKGPSVFPLAPSSKSTSGGTAALGCLVKDYFPEPVTVSWNSGALTSGVHTFPAVLQSSGLYSLSSVVTVPSSSLGTQTYICNVNHKPSNTKVDKRVEPKSCDKTHTSPPSPAPELLGGPSVFLFPPKPKDTLMISRTPEVTCVVVDVSHEDPEVKFNWYVDGVEVHNAKTKPREEQYNSTYRVVSVLTVLHQDWLNGKEYKCKVSNKALPAPIEKTISKAKGQPREPQVYTLPPSRDELTKNQVSLTCLVKGFYPSDIAVEWESNGQPENNYKTTPPVLDSDGSFFLYSKLTVDKSRWQQGNVFSCSVMHEALHNHYTQKSLSLSPGK

SEQ ID NO: 194 - protein, 330 aa, Artificial Sequence
  Synthetic: IgG1fa-P238S
ASTKGPSVFPLAPSSKSTSGGTAALGCLVKDYFPEPVTVSWNSGALTSGVHTFPAVLQSSGLYSLSSVVTVPSSSLGTQTYICNVNHKPSNTKVDKRVEPKSCDKTHTCPPCPAPELLGGSSVFLFPPKPKDTLMISRTPEVTCVVVDVSHEDPEVKFNWYVDGVEVHNAKTKPREEQYNSTYRVVSVLTVLHQDWLNGKEYKCKVSNKALPAPIEKTISKAKGQPREPQVYTLPPSRDELTKNQVSLTCLVKGFYPSDIAVEWESNGQPENNYKTTPPVLDSDGSFFLYSKLTVDKSRWQQGNVFSCSVMHEALHNHYTQKSLSLSPGK

SEQ ID NO: 195 - protein, 330 aa, Artificial Sequence
  Synthetic: IgG1fa-C226A
ASTKGPSVFPLAPSSKSTSGGTAALGCLVKDYFPEPVTVSWNSGALTSGVHTFPAVLQSSGLYSLSSVVTVPSSSLGTQTYICNVNHKPSNTKVDKRVEPKSCDKTHTAPPCPAPELLGGPSVFLFPPKPKDTLMISRTPEVTCVVVDVSHEDPEVKFNWYVDGVEVHNAKTKPREEQYNSTYRVVSVLTVLHQDWLNGKEYKCKVSNKALPAPIEKTISKAKGQPREPQVYTLPPSRDELTKNQVSLTCLVKGFYPSDIAVEWESNGQPENNYKTTPPVLDSDGSFFLYSKLTVDKSRWQQGNVFSCSVMHEALHNHYTQKSLSLSPGK

SEQ ID NO: 196 - protein, 330 aa, Artificial Sequence
  Synthetic: IgG1fa-C229A
ASTKGPSVFPLAPSSKSTSGGTAALGCLVKDYFPEPVTVSWNSGALTSGVHTFPAVLQSSGLYSLSSVVTVPSSSLGTQTYICNVNHKPSNTKVDKRVEPKSCDKTHTCPPAPAPELLGGPSVFLFPPKPKDTLMISRTPEVTCVVVDVSHEDPEVKFNWYVDGVEVHNAKTKPREEQYNSTYRVVSVLTVLHQDWLNGKEYKCKVSNKALPAPIEKTISKAKGQPREPQVYTLPPSRDELTKNQVSLTCLVKGFYPSDIAVEWESNGQPENNYKTTPPVLDSDGSFFLYSKLTVDKSRWQQGNVFSCSVMHEALHNHYTQKSLSLSPGK

SEQ ID NO: 197 - protein, 330 aa, Artificial Sequence
  Synthetic: IgG1fa-C226A,C229A
ASTKGPSVFPLAPSSKSTSGGTAALGCLVKDYFPEPVTVSWNSGALTSGVHTFPAVLQSSGLYSLSSVVTVPSSSLGTQTYICNVNHKPSNTKVDKRVEPKSCDKTHTAPPAPAPELLGGPSVFLFPPKPKDTLMISRTPEVTCVVVDVSHEDPEVKFNWYVDGVEVHNAKTKPREEQYNSTYRVVSVLTVLHQDWLNGKEYKCKVSNKALPAPIEKTISKAKGQPREPQVYTLPPSRDELTKNQVSLTCLVKGFYPSDIAVEWESNGQPENNYKTTPPVLDSDGSFFLYSKLTVDKSRWQQGNVFSCSVMHEALHNHYTQKSLSLSPGK

SEQ ID NO: 198 - protein, 330 aa, Artificial Sequence
  Synthetic: IgG1fa-P238K
ASTKGPSVFPLAPSSKSTSGGTAALGCLVKDYFPEPVTVSWNSGALTSGVHTFPAVLQSSGLYSLSSVVTVPSSSLGTQTYICNVNHKPSNTKVDKRVEPKSCDKTHTCPPCPAPELLGGKSVFLFPPKPKDTLMISRTPEVTCVVVDVSHEDPEVKFNWYVDGVEVHNAKTKPREEQYNSTYRVVSVLTVLHQDWLNGKEYKCKVSNKALPAPIEKTISKAKGQPREPQVYTLPPSRDELTKNQVSLTCLVKGFYPSDIAVEWESNGQPENNYKTTPPVLDSDGSFFLYSKLTVDKSRWQQGNVFSCSVMHEALHNHYTQKSLSLSPGK

SEQ ID NO: 199 - protein, 326 aa, Artificial Sequence
  Synthetic: IgG2.3-R133K
ASTKGPSVFPLAPCSKSTSESTAALGCLVKDYFPEPVTVSWNSGALTSGVHTFPAVLQSSGLYSLSSVVTVPSSNFGTQTYTCNVDHKPSNTKVDKTVERKSCVECPPCPAPPVAGPSVFLFPPKPKDTLMISRTPEVTCVVVDVSHEDPEVQFNWYVDGVEVHNAKTKPREEQFNSTFRVVSVLTVVHQDWLNGKEYKCKVSNKGLPAPIEKTISKTKGQPREPQVYTLPPSREEMTKNQVSLTCLVKGFYPSDIAVEWESNGQPENNYKTTPPMLDSDGSFFLYSKLTVDKSRWQQGNVFSCSVMHEALHNHYTQKSLSLSPGK

SEQ ID NO: 200 - protein, 326 aa, Artificial Sequence
  Synthetic: IgG2.3-E137G
ASTKGPSVFPLAPCSRSTSGSTAALGCLVKDYFPEPVTVSWNSGALTSGVHTFPAVLQSSGLYSLSSVVTVPSSNFGTQTYTCNVDHKPSNTKVDKTVERKSCVECPPCPAPPVAGPSVFLFPPKPKDTLMISRTPEVTCVVVDVSHEDPEVQFNWYVDGVEVHNAKTKPREEQFNSTFRVVSVLTVVHQDWLNGKEYKCKVSNKGLPAPIEKTISKTKGQPREPQVYTLPPSREEMTKNQVSLTCLVKGFYPSDIAVEWESNGQPENNYKTTPPMLDSDGSFFLYSKLTVDKSRWQQGNVFSCSVMHEALHNHYTQKSLSLSPGK

SEQ ID NO: 201 - protein, 326 aa, Artificial Sequence
  Synthetic: IgG2.3-S138G
ASTKGPSVFPLAPCSRSTSEGTAALGCLVKDYFPEPVTVSWNSGALTSGVHTFPAVLQSSGLYSLSSVVTVPSSNFGTQTYTCNVDHKPSNTKVDKTVERKSCVECPPCPAPPVAGPSVFLFPPKPKDTLMISRTPEVTCVVVDVSHEDPEVQFNWYVDGVEVHNAKTKPREEQFNSTFRVVSVLTVVHQDWLNGKEYKCKVSNKGLPAPIEKTISKTKGQPREPQVYTLPPSREEMTKNQVSLTCLVKGFYPSDIAVEWESNGQPENNYKTTPPMLDSDGSFFLYSKLTVDKSRWQQGNVFSCSVMHEALHNHYTQKSLSLSPGK

SEQ ID NO: 202 - protein, 326 aa, Artificial Sequence
  Synthetic: IgG2.3-E137G-S138G
ASTKGPSVFPLAPCSRSTSGGTAALGCLVKDYFPEPVTVSWNSGALTSGVHTFPAVLQSSGLYSLSSVVTVPSSNFGTQTYTCNVDHKPSNTKVDKTVERKSCVECPPCPAPPVAGPSVFLFPPKPKDTLMISRTPEVTCVVVDVSHEDPEVQFNWYVDGVEVHNAKTKPREEQFNSTFRVVSVLTVVHQDWLNGKEYKCKVSNKGLPAPIEKTISKTKGQPREPQVYTLPPSREEMTKNQVSLTCLVKGFYPSDIAVEWESNGQPENNYKTTPPMLDSDGSFFLYSKLTVDKSRWQQGNVFSCSVMHEALHNHYTQKSLSLSPGK

SEQ ID NO: 203 - protein, 326 aa, Artificial Sequence
  Synthetic: IgG2.3-T214R
ASTKGPSVFPLAPCSRSTSESTAALGCLVKDYFPEPVTVSWNSGALTSGVHTFPAVLQSSGLYSLSSVVTVPSSNFGTQTYTCNVDHKPSNTKVDKRVERKSCVECPPCPAPPVAGPSVFLFPPKPKDTLMISRTPEVTCVVVDVSHEDPEVQFNWYVDGVEVHNAKTKPREEQFNSTFRVVSVLTVVHQDWLNGKEYKCKVSNKGLPAPIEKTISKTKGQPREPQVYTLPPSREEMTKNQVSLTCLVKGFYPSDIAVEWESNGQPENNYKTTPPMLDSDGSFFLYSKLTVDKSRWQQGNVFSCSVMHEALHNHYTQKSLSLSPGK

SEQ ID NO: 204 - protein, 326 aa, Artificial Sequence
  Synthetic: IgG2.3-R217P
ASTKGPSVFPLAPCSRSTSESTAALGCLVKDYFPEPVTVSWNSGALTSGVHTFPAVLQSSGLYSLSSVVTVPSSNFGTQTYTCNVDHKPSNTKVDKTVEPKSCVECPPCPAPPVAGPSVFLFPPKPKDTLMISRTPEVTCVVVDVSHEDPEVQFNWYVDGVEVHNAKTKPREEQFNSTFRVVSVLTVVHQDWLNGKEYKCKVSNKGLPAPIEKTISKTKGQPREPQVYTLPPSREEMTKNQVSLTCLVKGFYPSDIAVEWESNGQPENNYKTTPPMLDSDGSFFLYSKLTVDKSRWQQGNVFSCSVMHEALHNHYTQKSLSLSPGK

SEQ ID NO: 205 - protein, 326 aa, Artificial Sequence
  Synthetic: IgG2.3-R217S
ASTKGPSVFPLAPCSRSTSESTAALGCLVKDYFPEPVTVSWNSGALTSGVHTFPAVLQSSGLYSLSSVVTVPSSNFGTQTYTCNVDHKPSNTKVDKTVESKSCVECPPCPAPPVAGPSVFLFPPKPKDTLMISRTPEVTCVVVDVSHEDPEVQFNWYVDGVEVHNAKTKPREEQFNSTFRVVSVLTVVHQDWLNGKEYKCKVSNKGLPAPIEKTISKTKGQPREPQVYTLPPSREEMTKNQVSLTCLVKGFYPSDIAVEWESNGQPENNYKTTPPMLDSDGSFFLYSKLTVDKSRWQQGNVFSCSVMHEALHNHYTQKSLSLSPGK

SEQ ID NO: 206 - protein, 326 aa, Artificial Sequence
  Synthetic: IgG2.3-V224A
ASTKGPSVFPLAPCSRSTSESTAALGCLVKDYFPEPVTVSWNSGALTSGVHTFPAVLQSSGLYSLSSVVTVPSSNFGTQTYTCNVDHKPSNTKVDKTVERKSCAECPPCPAPPVAGPSVFLFPPKPKDTLMISRTPEVTCVVVDVSHEDPEVQFNWYVDGVEVHNAKTKPREEQFNSTFRVVSVLTVVHQDWLNGKEYKCKVSNKGLPAPIEKTISKTKGQPREPQVYTLPPSREEMTKNQVSLTCLVKGFYPSDIAVEWESNGQPENNYKTTPPMLDSDGSFFLYSKLTVDKSRWQQGNVFSCSVMHEALHNHYTQKSLSLSPGK

SEQ ID NO: 207 - protein, 326 aa, Artificial Sequence
  Synthetic: IgG2.3-E225A
ASTKGPSVFPLAPCSRSTSESTAALGCLVKDYFPEPVTVSWNSGALTSGVHTFPAVLQSSGLYSLSSVVTVPSSNFGTQTYTCNVDHKPSNTKVDKTVERKSCVACPPCPAPPVAGPSVFLFPPKPKDTLMISRTPEVTCVVVDVSHEDPEVQFNWYVDGVEVHNAKTKPREEQFNSTFRVVSVLTVVHQDWLNGKEYKCKVSNKGLPAPIEKTISKTKGQPREPQVYTLPPSREEMTKNQVSLTCLVKGFYPSDIAVEWESNGQPENNYKTTPPMLDSDGSFFLYSKLTVDKSRWQQGNVFSCSVMHEALHNHYTQKSLSLSPGK

SEQ ID NO: 208 - protein, 326 aa, Artificial Sequence
  Synthetic: IgG2.3-R133A
ASTKGPSVFPLAPCSASTSESTAALGCLVKDYFPEPVTVSWNSGALTSGVHTFPAVLQSSGLYSLSSVVTVPSSNFGTQTYTCNVDHKPSNTKVDKTVERKSCVECPPCPAPPVAGPSVFLFPPKPKDTLMISRTPEVTCVVVDVSHEDPEVQFNWYVDGVEVHNAKTKPREEQFNSTFRVVSVLTVVHQDWLNGKEYKCKVSNKGLPAPIEKTISKTKGQPREPQVYTLPPSREEMTKNQVSLTCLVKGFYPSDIAVEWESNGQPENNYKTTPPMLDSDGSFFLYSKLTVDKSRWQQGNVFSCSVMHEALHNHYTQKSLSLSPGK

SEQ ID NO: 209 - protein, 326 aa, Artificial Sequence
  Synthetic: IgG2.3-E137D
ASTKGPSVFPLAPCSRSTSDSTAALGCLVKDYFPEPVTVSWNSGALTSGVHTFPAVLQSSGLYSLSSVVTVPSSNFGTQTYTCNVDHKPSNTKVDKTVERKSCVECPPCPAPPVAGPSVFLFPPKPKDTLMISRTPEVTCVVVDVSHEDPEVQFNWYVDGVEVHNAKTKPREEQFNSTFRVVSVLTVVHQDWLNGKEYKCKVSNKGLPAPIEKTISKTKGQPREPQVYTLPPSREEMTKNQVSLTCLVKGFYPSDIAVEWESNGQPENNYKTTPPMLDSDGSFFLYSKLTVDKSRWQQGNVFSCSVMHEALHNHYTQKSLSLSPGK

SEQ ID NO: 210 - protein, 326 aa, Artificial Sequence
  Synthetic: IgG2.3-E137Q
ASTKGPSVFPLAPCSRSTSQSTAALGCLVKDYFPEPVTVSWNSGALTSGVHTFPAVLQSSGLYSLSSVVTVPSSNFGTQTYTCNVDHKPSNTKVDKTVERKSCVECPPCPAPPVAGPSVFLFPPKPKDTLMISRTPEVTCVVVDVSHEDPEVQFNWYVDGVEVHNAKTKPREEQFNSTFRVVSVLTVVHQDWLNGKEYKCKVSNKGLPAPIEKTISKTKGQPREPQVYTLPPSREEMTKNQVSLTCLVKGFYPSDIAVEWESNGQPENNYKTTPPMLDSDGSFFLYSKLTVDKSRWQQGNVFSCSVMHEALHNHYTQKSLSLSPGK

SEQ ID NO: 211 - protein, 326 aa, Artificial Sequence
  Synthetic: IgG2.3-S138T
ASTKGPSVFPLAPCSRSTSETTAALGCLVKDYFPEPVTVSWNSGALTSGVHTFPAVLQSSGLYSLSSVVTVPSSNFGTQTYTCNVDHKPSNTKVDKTVERKSCVECPPCPAPPVAGPSVFLFPPKPKDTLMISRTPEVTCVVVDVSHEDPEVQFNWYVDGVEVHNAKTKPREEQFNSTFRVVSVLTVVHQDWLNGKEYKCKVSNKGLPAPIEKTISKTKGQPREPQVYTLPPSREEMTKNQVSLTCLVKGFYPSDIAVEWESNGQPENNYKTTPPMLDSDGSFFLYSKLTVDKSRWQQGNVFSCSVMHEALHNHYTQKSLSLSPGK

SEQ ID NO: 212 - protein, 326 aa, Artificial Sequence
  Synthetic: IgG2.3-S138E
ASTKGPSVFPLAPCSRSTSEETAALGCLVKDYFPEPVTVSWNSGALTSGVHTFPAVLQSSGLYSLSSVVTVPSSNFGTQTYTCNVDHKPSNTKVDKTVERKSCVECPPCPAPPVAGPSVFLFPPKPKDTLMISRTPEVTCVVVDVSHEDPEVQFNWYVDGVEVHNAKTKPREEQFNSTFRVVSVLTVVHQDWLNGKEYKCKVSNKGLPAPIEKTISKTKGQPREPQVYTLPPSREEMTKNQVSLTCLVKGFYPSDIAVEWESNGQPENNYKTTPPMLDSDGSFFLYSKLTVDKSRWQQGNVFSCSVMHEALHNHYTQKSLSLSPGK

SEQ ID NO: 213 - protein, 326 aa, Artificial Sequence
  Synthetic: IgG2.3-E137A-S138I
ASTKGPSVFPLAPCSRSTSAITAALGCLVKDYFPEPVTVSWNSGALTSGVHTFPAVLQSSGLYSLSSVVTVPSSNFGTQTYTCNVDHKPSNTKVDKTVERKSCVECPPCPAPPVAGPSVFLFPPKPKDTLMISRTPEVTCVVVDVSHEDPEVQFNWYVDGVEVHNAKTKPREEQFNSTFRVVSVLTVVHQDWLNGKEYKCKVSNKGLPAPIEKTISKTKGQPREPQVYTLPPSREEMTKNQVSLTCLVKGFYPSDIAVEWESNGQPENNYKTTPPMLDSDGSFFLYSKLTVDKSRWQQGNVFSCSVMHEALHNHYTQKSLSLSPGK

SEQ ID NO: 214 - protein, 326 aa, Artificial Sequence
  Synthetic: IgG2.3-E137I-S138A
ASTKGPSVFPLAPCSRSTSIATAALGCLVKDYFPEPVTVSWNSGALTSGVHTFPAVLQSSGLYSLSSVVTVPSSNFGTQTYTCNVDHKPSNTKVDKTVERKSCVECPPCPAPPVAGPSVFLFPPKPKDTLMISRTPEVTCVVVDVSHEDPEVQFNWYVDGVEVHNAKTKPREEQFNSTFRVVSVLTVVHQDWLNGKEYKCKVSNKGLPAPIEKTISKTKGQPREPQVYTLPPSREEMTKNQVSLTCLVKGFYPSDIAVEWESNGQPENNYKTTPPMLDSDGSFFLYSKLTVDKSRWQQGNVFSCSVMHEALHNHYTQKSLSLSPGK

SEQ ID NO: 215 - protein, 326 aa, Artificial Sequence
  Synthetic: IgG2.3-R217G
ASTKGPSVFPLAPCSRSTSESTAALGCLVKDYFPEPVTVSWNSGALTSGVHTFPAVLQSSGLYSLSSVVTVPSSNFGTQTYTCNVDHKPSNTKVDKTVEGKSCVECPPCPAPPVAGPSVFLFPPKPKDTLMISRTPEVTCVVVDVSHEDPEVQFNWYVDGVEVHNAKTKPREEQFNSTFRVVSVLTVVHQDWLNGKEYKCKVSNKGLPAPIEKTISKTKGQPREPQVYTLPPSREEMTKNQVSLTCLVKGFYPSDIAVEWESNGQPENNYKTTPPMLDSDGSFFLYSKLTVDKSRWQQGNVFSCSVMHEALHNHYTQKSLSLSPGK

SEQ ID NO: 216 - protein, 326 aa, Artificial Sequence
  Synthetic: IgG2.3-R217A
ASTKGPSVFPLAPCSRSTSESTAALGCLVKDYFPEPVTVSWNSGALTSGVHTFPAVLQSSGLYSLSSVVTVPSSNFGTQTYTCNVDHKPSNTKVDKTVEAKSCVECPPCPAPPVAGPSVFLFPPKPKDTLMISRTPEVTCVVVDVSHEDPEVQFNWYVDGVEVHNAKTKPREEQFNSTFRVVSVLTVVHQDWLNGKEYKCKVSNKGLPAPIEKTISKTKGQPREPQVYTLPPSREEMTKNQVSLTCLVKGFYPSDIAVEWESNGQPENNYKTTPPMLDSDGSFFLYSKLTVDKSRWQQGNVFSCSVMHEALHNHYTQKSLSLSPGK

SEQ ID NO: 217 - protein, 326 aa, Artificial Sequence
  Synthetic: IgG2.3-R217I
ASTKGPSVFPLAPCSRSTSESTAALGCLVKDYFPEPVTVSWNSGALTSGVHTFPAVLQSSGLYSLSSVVTVPSSNFGTQTYTCNVDHKPSNTKVDKTVEIKSCVECPPCPAPPVAGPSVFLFPPKPKDTLMISRTPEVTCVVVDVSHEDPEVQFNWYVDGVEVHNAKTKPREEQFNSTFRVVSVLTVVHQDWLNGKEYKCKVSNKGLPAPIEKTISKTKGQPREPQVYTLPPSREEMTKNQVSLTCLVKGFYPSDIAVEWESNGQPENNYKTTPPMLDSDGSFFLYSKLTVDKSRWQQGNVFSCSVMHEALHNHYTQKSLSLSPGK

SEQ ID NO: 218 - protein, 326 aa, Artificial Sequence
  Synthetic: IgG2.3-R217E
ASTKGPSVFPLAPCSRSTSESTAALGCLVKDYFPEPVTVSWNSGALTSGVHTFPAVLQSSGLYSLSSVVTVPSSNFGTQTYTCNVDHKPSNTKVDKTVEEKSCVECPPCPAPPVAGPSVFLFPPKPKDTLMISRTPEVTCVVVDVSHEDPEVQFNWYVDGVEVHNAKTKPREEQFNSTFRVVSVLTVVHQDWLNGKEYKCKVSNKGLPAPIEKTISKTKGQPREPQVYTLPPSREEMTKNQVSLTCLVKGFYPSDIAVEWESNGQPENNYKTTPPMLDSDGSFFLYSKLTVDKSRWQQGNVFSCSVMHEALHNHYTQKSLSLSPGK

SEQ ID NO: 219 - protein, 326 aa, Artificial Sequence
  Synthetic: IgG2.3-R217K
ASTKGPSVFPLAPCSRSTSESTAALGCLVKDYFPEPVTVSWNSGALTSGVHTFPAVLQSSGLYSLSSVVTVPSSNFGTQTYTCNVDHKPSNTKVDKTVEKKSCVECPPCPAPPVAGPSVFLFPPKPKDTLMISRTPEVTCVVVDVSHEDPEVQFNWYVDGVEVHNAKTKPREEQFNSTFRVVSVLTVVHQDWLNGKEYKCKVSNKGLPAPIEKTISKTKGQPREPQVYTLPPSREEMTKNQVSLTCLVKGFYPSDIAVEWESNGQPENNYKTTPPMLDSDGSFFLYSKLTVDKSRWQQGNVFSCSVMHEALHNHYTQKSLSLSPGK

SEQ ID NO: 220 - protein, 326 aa, Artificial Sequence
  Synthetic: IgG2.3-V224I
ASTKGPSVFPLAPCSRSTSESTAALGCLVKDYFPEPVTVSWNSGALTSGVHTFPAVLQSSGLYSLSSVVTVPSSNFGTQTYTCNVDHKPSNTKVDKTVERKSCIECPPCPAPPVAGPSVFLFPPKPKDTLMISRTPEVTCVVVDVSHEDPEVQFNWYVDGVEVHNAKTKPREEQFNSTFRVVSVLTVVHQDWLNGKEYKCKVSNKGLPAPIEKTISKTKGQPREPQVYTLPPSREEMTKNQVSLTCLVKGFYPSDIAVEWESNGQPENNYKTTPPMLDSDGSFFLYSKLTVDKSRWQQGNVFSCSVMHEALHNHYTQKSLSLSPGK

SEQ ID NO: 221 - protein, 326 aa, Artificial Sequence
  Synthetic: IgG2.3-E225D
ASTKGPSVFPLAPCSRSTSESTAALGCLVKDYFPEPVTVSWNSGALTSGVHTFPAVLQSSGLYSLSSVVTVPSSNFGTQTYTCNVDHKPSNTKVDKTVERKSCVDCPPCPAPPVAGPSVFLFPPKPKDTLMISRTPEVTCVVVDVSHEDPEVQFNWYVDGVEVHNAKTKPREEQFNSTFRVVSVLTVVHQDWLNGKEYKCKVSNKGLPAPIEKTISKTKGQPREPQVYTLPPSREEMTKNQVSLTCLVKGFYPSDIAVEWESNGQPENNYKTTPPMLDSDGSFFLYSKLTVDKSRWQQGNVFSCSVMHEALHNHYTQKSLSLSPGK

SEQ ID NO: 222 - protein, 327 aa, Artificial Sequence
  Synthetic: IgG2-G4.1-G4-G4
ASTKGPSVFPLAPCSRSTSESTAALGCLVKDYFPEPVTVSWNSGALTSGVHTFPAVLQSSGLYSLSSVVTVPSSNFGTQTYTCNVDHKPSNTKVDKTVERKYGPPCPPCPAPEFLGGPSVFLFPPKPKDTLMISRTPEVTCVVVDVSQEDPEVQFNWYVDGVEVHNAKTKPREEQFNSTYRVVSVLTVLHQDWLNGKEYKCKVSNKGLPSSIEKTISKAKGQPREPQVYTLPPSQEEMTKNQVSLTCLVKGFYPSDIAVEWESNGQPENNYKTTPPVLDSDGSFFLYSRLTVDKSRWQEGNVFSCSVMHEALHNHYTQKSLSLSLGK

SEQ ID NO: 223 - protein, 326 aa, Artificial Sequence
  Synthetic: IgG4-G2.3-G2-G2
ASTKGPSVFPLAPCSRSTSESTAALGCLVKDYFPEPVTVSWNSGALTSGVHTFPAVLQSSGLYSLSSVVTVPSSSLGTKTYTCNVDHKPSNTKVDKRVESKSCVECPPCPAPPVAGPSVFLFPPKPKDTLMISRTPEVTCVVVDVSHEDPEVQFNWYVDGVEVHNAKTKPREEQFNSTFRVVSVLTVVHQDWLNGKEYKCKVSNKGLPAPIEKTISKTKGQPREPQVYTLPPSREEMTKNQVSLTCLVKGFYPSDIAVEWESNGQPENNYKTTPPMLDSDGSFFLYSKLTVDKSRWQQGNVFSCSVMHEALHNHYTQKSLSLSPGK

SEQ ID NO: 224 - protein, 327 aa, Artificial Sequence
  Synthetic: IgG2-G4.1-G2-G2
ASTKGPSVFPLAPCSRSTSESTAALGCLVKDYFPEPVTVSWNSGALTSGVHTFPAVLQSSGLYSLSSVVTVPSSNFGTQTYTCNVDHKPSNTKVDKTVERKYGPPCPPCPAPEFLGGPSVFLFPPKPKDTLMISRTPEVTCVVVDVSHEDPEVQFNWYVDGVEVHNAKTKPREEQFNSTFRVVSVLTVVHQDWLNGKEYKCKVSNKGLPAPIEKTISKTKGQPREPQVYTLPPSREEMTKNQVSLTCLVKGFYPSDIAVEWESNGQPENNYKTTPPMLDSDGSFFLYSKLTVDKSRWQQGNVFSCSVMHEALHNHYTQKSLSLSPGK

SEQ ID NO: 225 - protein, 326 aa, Artificial Sequence
  Synthetic: IgG4-G2.3-G4-G4
ASTKGPSVFPLAPCSRSTSESTAALGCLVKDYFPEPVTVSWNSGALTSGVHTFPAVLQSSGLYSLSSVVTVPSSSLGTKTYTCNVDHKPSNTKVDKRVESKSCVECPPCPAPPVAGPSVFLFPPKPKDTLMISRTPEVTCVVVDVSQEDPEVQFNWYVDGVEVHNAKTKPREEQFNSTYRVVSVLTVLHQDWLNGKEYKCKVSNKGLPSSIEKTISKAKGQPREPQVYTLPPSQEEMTKNQVSLTCLVKGFYPSDIAVEWESNGQPENNYKTTPPVLDSDGSFFLYSRLTVDKSRWQEGNVFSCSVMHEALHNHYTQKSLSLSLGK

SEQ ID NO: 226 - protein, 326 aa, Artificial Sequence
  Synthetic: IgG2-G2.3-G4-G4
ASTKGPSVFPLAPCSRSTSESTAALGCLVKDYFPEPVTVSWNSGALTSGVHTFPAVLQSSGLYSLSSVVTVPSSNFGTQTYTCNVDHKPSNTKVDKTVERKSCVECPPCPAPPVAGPSVFLFPPKPKDTLMISRTPEVTCVVVDVSQEDPEVQFNWYVDGVEVHNAKTKPREEQFNSTYRVVSVLTVLHQDWLNGKEYKCKVSNKGLPSSIEKTISKAKGQPREPQVYTLPPSQEEMTKNQVSLTCLVKGFYPSDIAVEWESNGQPENNYKTTPPVLDSDGSFFLYSRLTVDKSRWQEGNVFSCSVMHEALHNHYTQKSLSLSLGK

SEQ ID NO: 227 - protein, 327 aa, Artificial Sequence
  Synthetic: IgG4-G4.1-G2-G2
ASTKGPSVFPLAPCSRSTSESTAALGCLVKDYFPEPVTVSWNSGALTSGVHTFPAVLQSSGLYSLSSVVTVPSSSLGTKTYTCNVDHKPSNTKVDKRVESKYGPPCPPCPAPEFLGGPSVFLFPPKPKDTLMISRTPEVTCVVVDVSHEDPEVQFNWYVDGVEVHNAKTKPREEQFNSTFRVVSVLTVVHQDWLNGKEYKCKVSNKGLPAPIEKTISKTKGQPREPQVYTLPPSREEMTKNQVSLTCLVKGFYPSDIAVEWESNGQPENNYKTTPPMLDSDGSFFLYSKLTVDKSRWQQGNVFSCSVMHEALHNHYTQKSLSLSPGK

SEQ ID NO: 228 - protein, 327 aa, Artificial Sequence
  Synthetic: IgG4-G4.1-G1-G1
ASTKGPSVFPLAPCSRSTSESTAALGCLVKDYFPEPVTVSWNSGALTSGVHTFPAVLQSSGLYSLSSVVTVPSSSLGTKTYTCNVDHKPSNTKVDKRVESKYGPPCPPCPAPEFLGGPSVFLFPPKPKDTLMISRTPEVTCVVVDVSHEDPEVKFNWYVDGVEVHNAKTKPREEQYNSTYRVVSVLTVLHQDWLNGKEYKCKVSNKALPAPIEKTISKAKGQPREPQVYTLPPSREEMTKNQVSLTCLVKGFYPSDIAVEWESNGQPENNYKTTPPVLDSDGSFFLYSKLTVDKSRWQQGNVFSCSVMHEALHNHYTQKSLSLSPGK

SEQ ID NO: 229 - protein, 327 aa, Artificial Sequence
  Synthetic: IgG4.1
ASTKGPSVFPLAPCSRSTSESTAALGCLVKDYFPEPVTVSWNSGALTSGVHTFPAVLQSSGLYSLSSVVTVPSSSLGTKTYTCNVDHKPSNTKVDKRVESKYGPPCPPCPAPEFLGGPSVFLFPPKPKDTLMISRTPEVTCVVVDVSQEDPEVQFNWYVDGVEVHNAKTKPREEQFNSTYRVVSVLTVLHQDWLNGKEYKCKVSNKGLPSSIEKTISKAKGQPREPQVYTLPPSQEEMTKNQVSLTCLVKGFYPSDIAVEWESNGQPENNYKTTPPVLDSDGSFFLYSRLTVDKSRWQEGNVFSCSVMHEALHNHYTQKSLSLSLGK

SEQ ID NO: 230 - protein, 327 aa, Artificial Sequence
  Synthetic: IgG4.1-R214T
ASTKGPSVFPLAPCSRSTSESTAALGCLVKDYFPEPVTVSWNSGALTSGVHTFPAVLQSSGLYSLSSVVTVPSSSLGTKTYTCNVDHKPSNTKVDKTVESKYGPPCPPCPAPEFLGGPSVFLFPPKPKDTLMISRTPEVTCVVVDVSQEDPEVQFNWYVDGVEVHNAKTKPREEQFNSTYRVVSVLTVLHQDWLNGKEYKCKVSNKGLPSSIEKTISKAKGQPREPQVYTLPPSQEEMTKNQVSLTCLVKGFYPSDIAVEWESNGQPENNYKTTPPVLDSDGSFFLYSRLTVDKSRWQEGNVFSCSVMHEALHNHYTQKSLSLSLGK

SEQ ID NO: 231 - protein, 327 aa, Artificial Sequence
  Synthetic: IgG4.1-S217R
ASTKGPSVFPLAPCSRSTSESTAALGCLVKDYFPEPVTVSWNSGALTSGVHTFPAVLQSSGLYSLSSVVTVPSSSLGTKTYTCNVDHKPSNTKVDKRVERKYGPPCPPCPAPEFLGGPSVFLFPPKPKDTLMISRTPEVTCVVVDVSQEDPEVQFNWYVDGVEVHNAKTKPREEQFNSTYRVVSVLTVLHQDWLNGKEYKCKVSNKGLPSSIEKTISKAKGQPREPQVYTLPPSQEEMTKNQVSLTCLVKGFYPSDIAVEWESNGQPENNYKTTPPVLDSDGSFFLYSRLTVDKSRWQEGNVFSCSVMHEALHNHYTQKSLSLSLGK

SEQ ID NO: 232 - protein, 327 aa, Artificial Sequence
  Synthetic: IgG4.1-S217P
ASTKGPSVFPLAPCSRSTSESTAALGCLVKDYFPEPVTVSWNSGALTSGVHTFPAVLQSSGLYSLSSVVTVPSSSLGTKTYTCNVDHKPSNTKVDKRVEPKYGPPCPPCPAPEFLGGPSVFLFPPKPKDTLMISRTPEVTCVVVDVSQEDPEVQFNWYVDGVEVHNAKTKPREEQFNSTYRVVSVLTVLHQDWLNGKEYKCKVSNKGLPSSIEKTISKAKGQPREPQVYTLPPSQEEMTKNQVSLTCLVKGFYPSDIAVEWESNGQPENNYKTTPPVLDSDGSFFLYSRLTVDKSRWQEGNVFSCSVMHEALHNHYTQKSLSLSLGK

SEQ ID NO: 233 - protein, 329 aa, Artificial Sequence
  Synthetic: IgG1fa
ASTKGPSVFPLAPSSKSTSGGTAALGCLVKDYFPEPVTVSWNSGALTSGVHTFPAVLQSSGLYSLSSVVTVPSSSLGTQTYICNVNHKPSNTKVDKRVEPKSCDKTHTCPPCPAPELLGGPSVFLFPPKPKDTLMISRTPEVTCVVVDVSHEDPEVKFNWYVDGVEVHNAKTKPREEQYNSTYRVVSVLTVLHQDWLNGKEYKCKVSNKALPAPIEKTISKAKGQPREPQVYTLPPSRDELTKNQVSLTCLVKGFYPSDIAVEWESNGQPENNYKTTPPVLDSDGSFFLYSKLTVDKSRWQQGNVFSCSVMHEALHNHYTQKSLSLSPG

SEQ ID NO: 234 - protein, 330 aa, Artificial Sequence
  Synthetic: IgG1.3fa
ASTKGPSVFPLAPSSKSTSGGTAALGCLVKDYFPEPVTVSWNSGALTSGVHTFPAVLQSSGLYSLSSVVTVPSSSLGTQTYICNVNHKPSNTKVDKRVEPKSCDKTHTCPPCPAPEAEGAPSVFLFPPKPKDTLMISRTPEVTCVVVDVSHEDPEVKFNWYVDGVEVHNAKTKPREEQYNSTYRVVSVLTVLHQDWLNGKEYKCKVSNKALPAPIEKTISKAKGQPREPQVYTLPPSRDELTKNQVSLTCLVKGFYPSDIAVEWESNGQPENNYKTTPPVLDSDGSFFLYSKLTVDKSRWQQGNVFSCSVMHEALHNHYTQKSLSLSPGK

SEQ ID NO: 235 - protein, 330 aa, Artificial Sequence; identical to SEQ ID NO: 198
  Synthetic: IgG1fa-P238K

SEQ ID NO: 236 - protein, 330 aa, Artificial Sequence
  Synthetic: IgG1.3fa-P238K
ASTKGPSVFPLAPSSKSTSGGTAALGCLVKDYFPEPVTVSWNSGALTSGVHTFPAVLQSSGLYSLSSVVTVPSSSLGTQTYICNVNHKPSNTKVDKRVEPKSCDKTHTCPPCPAPEAEGAKSVFLFPPKPKDTLMISRTPEVTCVVVDVSHEDPEVKFNWYVDGVEVHNAKTKPREEQYNSTYRVVSVLTVLHQDWLNGKEYKCKVSNKALPAPIEKTISKAKGQPREPQVYTLPPSRDELTKNQVSLTCLVKGFYPSDIAVEWESNGQPENNYKTTPPVLDSDGSFFLYSKLTVDKSRWQQGNVFSCSVMHEALHNHYTQKSLSLSPGK

SEQ ID NO: 237 - protein, 330 aa, Artificial Sequence
  Synthetic: IgG1fa-L235E-P238K
ASTKGPSVFPLAPSSKSTSGGTAALGCLVKDYFPEPVTVSWNSGALTSGVHTFPAVLQSSGLYSLSSVVTVPSSSLGTQTYICNVNHKPSNTKVDKRVEPKSCDKTHTCPPCPAPELEGGKSVFLFPPKPKDTLMISRTPEVTCVVVDVSHEDPEVKFNWYVDGVEVHNAKTKPREEQYNSTYRVVSVLTVLHQDWLNGKEYKCKVSNKALPAPIEKTISKAKGQPREPQVYTLPPSRDELTKNQVSLTCLVKGFYPSDIAVEWESNGQPENNYKTTPPVLDSDGSFFLYSKLTVDKSRWQQGNVFSCSVMHEALHNHYTQKSLSLSPGK

SEQ ID NO: 238 - protein, 330 aa, Artificial Sequence
  Synthetic: IgG1fa-L235A-P238K
ASTKGPSVFPLAPSSKSTSGGTAALGCLVKDYFPEPVTVSWNSGALTSGVHTFPAVLQSSGLYSLSSVVTVPSSSLGTQTYICNVNHKPSNTKVDKRVEPKSCDKTHTCPPCPAPELAGGKSVFLFPPKPKDTLMISRTPEVTCVVVDVSHEDPEVKFNWYVDGVEVHNAKTKPREEQYNSTYRVVSVLTVLHQDWLNGKEYKCKVSNKALPAPIEKTISKAKGQPREPQVYTLPPSRDELTKNQVSLTCLVKGFYPSDIAVEWESNGQPENNYKTTPPVLDSDGSFFLYSKLTVDKSRWQQGNVFSCSVMHEALHNHYTQKSLSLSPGK

SEQ ID NO: 239 - protein, 330 aa, Artificial Sequence
  Synthetic: IgG1fa-L235E-P238K-K322A
ASTKGPSVFPLAPSSKSTSGGTAALGCLVKDYFPEPVTVSWNSGALTSGVHTFPAVLQSSGLYSLSSVVTVPSSSLGTQTYICNVNHKPSNTKVDKRVEPKSCDKTHTCPPCPAPELEGGKSVFLFPPKPKDTLMISRTPEVTCVVVDVSHEDPEVKFNWYVDGVEVHNAKTKPREEQYNSTYRVVSVLTVLHQDWLNGKEYKCAVSNKALPAPIEKTISKAKGQPREPQVYTLPPSRDELTKNQVSLTCLVKGFYPSDIAVEWESNGQPENNYKTTPPVLDSDGSFFLYSKLTVDKSRWQQGNVFSCSVMHEALHNHYTQKSLSLSPGK

SEQ ID NO: 240 - protein, 326 aa, Artificial Sequence; identical to SEQ ID NO: 79
  Synthetic: IgG2.3

SEQ ID NO: 241 - protein, 326 aa, Artificial Sequence
  Synthetic: IgG2.3-P238K
ASTKGPSVFPLAPCSRSTSESTAALGCLVKDYFPEPVTVSWNSGALTSGVHTFPAVLQSSGLYSLSSVVTVPSSNFGTQTYTCNVDHKPSNTKVDKTVERKSCVECPPCPAPPVAGKSVFLFPPKPKDTLMISRTPEVTCVVVDVSHEDPEVQFNWYVDGVEVHNAKTKPREEQFNSTFRVVSVLTVVHQDWLNGKEYKCKVSNKGLPAPIEKTISKTKGQPREPQVYTLPPSREEMTKNQVSLTCLVKGFYPSDIAVEWESNGQPENNYKTTPPMLDSDGSFFLYSKLTVDKSRWQQGNVFSCSVMHEALHNHYTQKSLSLSPGK

SEQ ID NO: 242 - protein, 327 aa, Artificial Sequence; identical to SEQ ID NO: 80
  Synthetic: IgG2.3G1

SEQ ID NO: 243 - protein, 327 aa, Artificial Sequence
  Synthetic: IgG2.3G1-P238K
ASTKGPSVFPLAPCSRSTSESTAALGCLVKDYFPEPVTVSWNSGALTSGVHTFPAVLQSSGLYSLSSVVTVPSSNFGTQTYTCNVDHKPSNTKVDKTVERKSCVECPPCPAPELLGGKSVFLFPPKPKDTLMISRTPEVTCVVVDVSHEDPEVKFNWYVDGVEVHNAKTKPREEQYNSTYRVVSVLTVLHQDWLNGKEYKCKVSNKALPAPIEKTISKAKGQPREPQVYTLPPSREEMTKNQVSLTCLVKGFYPSDIAVEWESNGQPENNYKTTPPVLDSDGSFFLYSKLTVDKSRWQQGNVFSCSVMHEALHNHYTQKSLSLSPGK

SEQ ID NO: 244 - protein, 327 aa, Artificial Sequence
  Synthetic: IgG2.3G1-L235E-P238K
ASTKGPSVFPLAPCSRSTSESTAALGCLVKDYFPEPVTVSWNSGALTSGVHTFPAVLQSSGLYSLSSVVTVPSSNFGTQTYTCNVDHKPSNTKVDKTVERKSCVECPPCPAPELEGGKSVFLFPPKPKDTLMISRTPEVTCVVVDVSHEDPEVKFNWYVDGVEVHNAKTKPREEQYNSTYRVVSVLTVLHQDWLNGKEYKCKVSNKALPAPIEKTISKAKGQPREPQVYTLPPSREEMTKNQVSLTCLVKGFYPSDIAVEWESNGQPENNYKTTPPVLDSDGSFFLYSKLTVDKSRWQQGNVFSCSVMHEALHNHYTQKSLSLSPGK

SEQ ID NO: 245 - protein, 327 aa, Artificial Sequence
  Synthetic: IgG2.5G1-P238K
ASTKGPSVFPLAPSSRSTSESTAALGCLVKDYFPEPVTVSWNSGALTSGVHTFPAVLQSSGLYSLSSVVTVPSSNFGTQTYTCNVDHKPSNTKVDKTVERKCCVECPPCPAPELLGGKSVFLFPPKPKDTLMISRTPEVTCVVVDVSHEDPEVKFNWYVDGVEVHNAKTKPREEQYNSTYRVVSVLTVLHQDWLNGKEYKCKVSNKALPAPIEKTISKAKGQPREPQVYTLPPSREEMTKNQVSLTCLVKGFYPSDIAVEWESNGQPENNYKTTPPVLDSDGSFFLYSKLTVDKSRWQQGNVFSCSVMHEALHNHYTQKSLSLSPGK

SEQ ID NO: 246 - protein, 330 aa, Artificial Sequence; identical to SEQ ID NO: 78
  Synthetic: hIgG1f

SEQ ID NO: 247 - protein, 330 aa, Artificial Sequence
  Synthetic: hIgG1f-P238K
ASTKGPSVFPLAPSSKSTSGGTAALGCLVKDYFPEPVTVSWNSGALTSGVHTFPAVLQSSGLYSLSSVVTVPSSSLGTQTYICNVNHKPSNTKVDKRVEPKSCDKTHTCPPCPAPELLGGKSVFLFPPKPKDTLMISRTPEVTCVVVDVSHEDPEVKFNWYVDGVEVHNAKTKPREEQYNSTYRVVSVLTVLHQDWLNGKEYKCKVSNKALPAPIEKTISKAKGQPREPQVYTLPPSREEMTKNQVSLTCLVKGFYPSDIAVEWESNGQPENNYKTTPPVLDSDGSFFLYSKLTVDKSRWQQGNVFSCSVMHEALHNHYTQKSLSLSPGK

SEQ ID NO: 248 - protein, 330 aa, Artificial Sequence
  Synthetic: hIgG1.3f
ASTKGPSVFPLAPSSKSTSGGTAALGCLVKDYFPEPVTVSWNSGALTSGVHTFPAVLQSSGLYSLSSVVTVPSSSLGTQTYICNVNHKPSNTKVDKRVEPKSCDKTHTCPPCPAPEAEGAPSVFLFPPKPKDTLMISRTPEVTCVVVDVSHEDPEVKFNWYVDGVEVHNAKTKPREEQYNSTYRVVSVLTVLHQDWLNGKEYKCKVSNKALPAPIEKTISKAKGQPREPQVYTLPPSREEMTKNQVSLTCLVKGFYPSDIAVEWESNGQPENNYKTTPPVLDSDGSFFLYSKLTVDKSRWQQGNVFSCSVMHEALHNHYTQKSLSLSPGK

SEQ ID NO: 249 - protein, 330 aa, Artificial Sequence
  Synthetic: hIgG1.3f-P238K
ASTKGPSVFPLAPSSKSTSGGTAALGCLVKDYFPEPVTVSWNSGALTSGVHTFPAVLQSSGLYSLSSVVTVPSSSLGTQTYICNVNHKPSNTKVDKRVEPKSCDKTHTCPPCPAPEAEGAKSVFLFPPKPKDTLMISRTPEVTCVVVDVSHEDPEVKFNWYVDGVEVHNAKTKPREEQYNSTYRVVSVLTVLHQDWLNGKEYKCKVSNKALPAPIEKTISKAKGQPREPQVYTLPPSREEMTKNQVSLTCLVKGFYPSDIAVEWESNGQPENNYKTTPPVLDSDGSFFLYSKLTVDKSRWQQGNVFSCSVMHEALHNHYTQKSLSLSPGK

SEQ ID NO: 250 - protein, 330 aa, Artificial Sequence
  Synthetic: hIgG1f-L235E-P238K
ASTKGPSVFPLAPSSKSTSGGTAALGCLVKDYFPEPVTVSWNSGALTSGVHTFPAVLQSSGLYSLSSVVTVPSSSLGTQTYICNVNHKPSNTKVDKRVEPKSCDKTHTCPPCPAPELEGGKSVFLFPPKPKDTLMISRTPEVTCVVVDVSHEDPEVKFNWYVDGVEVHNAKTKPREEQYNSTYRVVSVLTVLHQDWLNGKEYKCKVSNKALPAPIEKTISKAKGQPREPQVYTLPPSREEMTKNQVSLTCLVKGFYPSDIAVEWESNGQPENNYKTTPPVLDSDGSFFLYSKLTVDKSRWQQGNVFSCSVMHEALHNHYTQKSLSLSPGK

SEQ ID NO: 251 - protein, 330 aa, Artificial Sequence
  Synthetic: hIgG1f-L235E-P238K-K322A
ASTKGPSVFPLAPSSKSTSGGTAALGCLVKDYFPEPVTVSWNSGALTSGVHTFPAVLQSSGLYSLSSVVTVPSSSLGTQTYICNVNHKPSNTKVDKRVEPKSCDKTHTCPPCPAPELEGGKSVFLFPPKPKDTLMISRTPEVTCVVVDVSHEDPEVKFNWYVDGVEVHNAKTKPREEQYNSTYRVVSVLTVLHQDWLNGKEYKCAVSNKALPAPIEKTISKAKGQPREPQVYTLPPSREEMTKNQVSLTCLVKGFYPSDIAVEWESNGQPENNYKTTPPVLDSDGSFFLYSKLTVDKSRWQQGNVFSCSVMHEALHNHYTQKSLSLSPGK

SEQ ID NO: 252 - protein, 327 aa, Artificial Sequence; identical to SEQ ID NO: 180
  Synthetic: IgG2.3G1.3f

SEQ ID NO: 253 - protein, 327 aa, Artificial Sequence
  Synthetic: IgG2.3G1.3f-P238K
ASTKGPSVFPLAPCSRSTSESTAALGCLVKDYFPEPVTVSWNSGALTSGVHTFPAVLQSSGLYSLSSVVTVPSSNFGTQTYTCNVDHKPSNTKVDKTVERKSCVECPPCPAPEAEGAKSVFLFPPKPKDTLMISRTPEVTCVVVDVSHEDPEVKFNWYVDGVEVHNAKTKPREEQYNSTYRVVSVLTVLHQDWLNGKEYKCKVSNKALPAPIEKTISKAKGQPREPQVYTLPPSREEMTKNQVSLTCLVKGFYPSDIAVEWESNGQPENNYKTTPPVLDSDGSFFLYSKLTVDKSRWQQGNVFSCSVMHEALHNHYTQKSLSLSPGK

SEQ ID NO: 254 - protein, 327 aa, Artificial Sequence
  Synthetic: IgG2.3G1-L235E-P238K-K322A
ASTKGPSVFPLAPCSRSTSESTAALGCLVKDYFPEPVTVSWNSGALTSGVHTFPAVLQSSGLYSLSSVVTVPSSNFGTQTYTCNVDHKPSNTKVDKTVERKSCVECPPCPAPELEGGKSVFLFPPKPKDTLMISRTPEVTCVVVDVSHEDPEVKFNWYVDGVEVHNAKTKPREEQYNSTYRVVSVLTVLHQDWLNGKEYKCAVSNKALPAPIEKTISKAKGQPREPQVYTLPPSREEMTKNQVSLTCLVKGFYPSDIAVEWESNGQPENNYKTTPPVLDSDGSFFLYSKLTVDKSRWQQGNVFSCSVMHEALHNHYTQKSLSLSPGK

SEQ ID NO: 255 - protein, 326 aa, Artificial Sequence; identical to SEQ ID NO: 82
  Synthetic: IgG2.5

SEQ ID NO: 256 - protein, 326 aa, Artificial Sequence
  Synthetic: IgG2.5-P238K
ASTKGPSVFPLAPSSRSTSESTAALGCLVKDYFPEPVTVSWNSGALTSGVHTFPAVLQSSGLYSLSSVVTVPSSNFGTQTYTCNVDHKPSNTKVDKTVERKCCVECPPCPAPPVAGKSVFLFPPKPKDTLMISRTPEVTCVVVDVSHEDPEVQFNWYVDGVEVHNAKTKPREEQFNSTFRVVSVLTVVHQDWLNGKEYKCKVSNKGLPAPIEKTISKTKGQPREPQVYTLPPSREEMTKNQVSLTCLVKGFYPSDIAVEWESNGQPENNYKTTPPMLDSDGSFFLYSKLTVDKSRWQQGNVFSCSVMHEALHNHYTQKSLSLSPGK

SEQ ID NO: 257 - protein, 327 aa, Artificial Sequence; identical to SEQ ID NO: 89
  Synthetic: IgG2.5G1

SEQ ID NO: 258 - protein, 327 aa, Artificial Sequence; identical to SEQ ID NO: 245
  Synthetic: IgG2.5G1-P238K

SEQ ID NO: 259 - protein, 327 aa, Artificial Sequence; identical to SEQ ID NO: 184
  Synthetic: IgG2.5G1.3f

SEQ ID NO: 260 - protein, 327 aa, Artificial Sequence
  Synthetic: IgG2.5G1.3f-P238K
ASTKGPSVFPLAPSSRSTSESTAALGCLVKDYFPEPVTVSWNSGALTSGVHTFPAVLQSSGLYSLSSVVTVPSSNFGTQTYTCNVDHKPSNTKVDKTVERKCCVECPPCPAPEAEGAKSVFLFPPKPKDTLMISRTPEVTCVVVDVSHEDPEVKFNWYVDGVEVHNAKTKPREEQYNSTYRVVSVLTVLHQDWLNGKEYKCKVSNKALPAPIEKTISKAKGQPREPQVYTLPPSREEMTKNQVSLTCLVKGFYPSDIAVEWESNGQPENNYKTTPPVLDSDGSFFLYSKLTVDKSRWQQGNVFSCSVMHEALHNHYTQKSLSLSPGK

SEQ ID NO: 261 - protein, 327 aa, Artificial Sequence
  Synthetic: IgG2.5G1-L235E-P238K
ASTKGPSVFPLAPSSRSTSESTAALGCLVKDYFPEPVTVSWNSGALTSGVHTFPAVLQSSGLYSLSSVVTVPSSNFGTQTYTCNVDHKPSNTKVDKTVERKCCVECPPCPAPELEGGKSVFLFPPKPKDTLMISRTPEVTCVVVDVSHEDPEVKFNWYVDGVEVHNAKTKPREEQYNSTYRVVSVLTVLHQDWLNGKEYKCKVSNKALPAPIEKTISKAKGQPREPQVYTLPPSREEMTKNQVSLTCLVKGFYPSDIAVEWESNGQPENNYKTTPPVLDSDGSFFLYSKLTVDKSRWQQGNVFSCSVMHEALHNHYTQKSLSLSPGK

SEQ ID NO: 262 - protein, 327 aa, Artificial Sequence
  Synthetic: IgG2.5G1-L235E-P238K-K322A
ASTKGPSVFPLAPSSRSTSESTAALGCLVKDYFPEPVTVSWNSGALTSGVHTFPAVLQSSGLYSLSSVVTVPSSNFGTQTYTCNVDHKPSNTKVDKTVERKCCVECPPCPAPELEGGKSVFLFPPKPKDTLMISRTPEVTCVVVDVSHEDPEVKFNWYVDGVEVHNAKTKPREEQYNSTYRVVSVLTVLHQDWLNGKEYKCAVSNKALPAPIEKTISKAKGQPREPQVYTLPPSREEMTKNQVSLTCLVKGFYPSDIAVEWESNGQPENNYKTTPPVLDSDGSFFLYSKLTVDKSRWQQGNVFSCSVMHEALHNHYTQKSLSLSPGK

SEQ ID NO: 263 - protein, 348 aa, Artificial Sequence
  Synthetic: 3h56-269-IgG4.1 OR BMS-986090
EVQLLESGGGLVQPGGSLRLSCAASGFTFRDYEMWWVRQAPGKGLERVSAINPQGTRTYYADSVKGRFTISRDNSKNTLYLQMNSLRAEDTAVYYCAKLPFRFSDRGQGTLVTVSSASTESKYGPPCPPCPAPEFLGGPSVFLFPPKPKDTLMISRTPEVTCVVVDVSQEDPEVQFNWYVDGVEVHNAKTKPREEQFNSTYRVVSVLTVLHQDWLNGKEYKCKVSNKGLPSSIEKTISKAKGQPREPQVYTLPPSQEEMTKNQVSLTCLVKGFYPSDIAVEWESNGQPENNYKTTPPVLDSDGSFFLYSRLTVDKSRWQEGNVFSCSVMHEALHNHYTQKSLSLSLGK

SEQ ID NO: 264 - protein, 351 aa, Artificial Sequence
  Synthetic: 3h56-269-CT
EVQLLESGGGLVQPGGSLRLSCAASGFTFRDYEMWWVRQAPGKGLERVSAINPQGTRTYYADSVKGRFTISRDNSKNTLYLQMNSLRAEDTAVYYCAKLPFRFSDRGQGTLVTVSSASTEPKSSDKTHTSPPSPAPELLGGSSVFLFPPKPKDTLMISRTPEVTCVVVDVSHEDPEVKFNWYVDGVEVHNAKTKPREEQYNSTYRVVSVLTVLHQDWLNGKEYKCKVSNKALPAPIEKTISKAKGQPREPQVYTLPPSRDELTKNQVSLTCLVKGFYPSDIAVEWESNGQPENNYKTTPPVLDSDGSFFLYSKLTVDKSRWQQGNVFSCSVMHEALHNHYTQKSLSLSPGK

SEQ ID NO: 265 - protein, 351 aa, Artificial Sequence
  Synthetic: 3h56-269-IgG1.1f
EVQLLESGGGLVQPGGSLRLSCAASGFTFRDYEMWWVRQAPGKGLERVSAINPQGTRTYYADSVKGRFTISRDNSKNTLYLQMNSLRAEDTAVYYCAKLPFRFSDRGQGTLVTVSSASTEPKSCDKTHTCPPCPAPEAEGAPSVFLFPPKPKDTLMISRTPEVTCVVVDVSHEDPEVKFNWYVDGVEVHNAKTKPREEQYNSTYRVVSVLTVLHQDWLNGKEYKCKVSNKALPSSIEKTISKAKGQPREPQVYTLPPSREEMTKNQVSLTCLVKGFYPSDIAVEWESNGQPENNYKTTPPVLDSDGSFFLYSKLTVDKSRWQQGNVFSCSVMHEALHNHYTQKSLSLSPGK

SEQ ID NO: 266 - protein, 351 aa, Artificial Sequence
  Synthetic: 3h56-269-IgG1.3f
EVQLLESGGGLVQPGGSLRLSCAASGFTFRDYEMWWVRQAPGKGLERVSAINPQGTRTYYADSVKGRFTISRDNSKNTLYLQMNSLRAEDTAVYYCAKLPFRFSDRGQGTLVTVSSASTEPKSCDKTHTCPPCPAPEAEGAPSVFLFPPKPKDTLMISRTPEVTCVVVDVSHEDPEVKFNWYVDGVEVHNAKTKPREEQYNSTYRVVSVLTVLHQDWLNGKEYKCKVSNKALPAPIEKTISKAKGQPREPQVYTLPPSREEMTKNQVSLTCLVKGFYPSDIAVEWESNGQPENNYKTTPPVLDSDGSFFLYSKLTVDKSRWQQGNVFSCSVMHEALHNHYTQKSLSLSPGK

SEQ ID NO: 267 - protein, 351 aa, Artificial Sequence
  Synthetic: 3h56-269-IgG1-D265A
EVQLLESGGGLVQPGGSLRLSCAASGFTFRDYEMWWVRQAPGKGLERVSAINPQGTRTYYADSVKGRFTISRDNSKNTLYLQMNSLRAEDTAVYYCAKLPFRFSDRGQGTLVTVSSASTEPKSCDKTHTCPPCPAPELLGGPSVFLFPPKPKDTLMISRTPEVTCVVVAVSHEDPEVKFNWYVDGVEVHNAKTKPREEQYNSTYRVVSVLTVLHQDWLNGKEYKCKVSNKALPAPIEKTISKAKGQPREPQVYTLPPSREEMTKNQVSLTCLVKGFYPSDIAVEWESNGQPENNYKTTPPVLDSDGSFFLYSKLTVDKSRWQQGNVFSCSVMHEALHNHYTQKSLSLSPGK

SEQ ID NO: 268 - protein, 218 aa, Artificial Sequence
  Synthetic: 1F4 Heavy chain variable region and CH1
EVQLLESGGGLVQPGGSLRLSCAASGFTFSIYAMSWVRQAPGKGLEWVSAISDSGGRTYFADSVRGRFTISRDNSKNTLSLQMNSLRAEDTAVYYCAKVDYSNYLFFDYWGQGTLVTVSSASTKGPSVFPLAPSSKSTSGGTAALGCLVKDYFPEPVTVSWNSGALTSGVHTFPAVLQSSGLYSLSSVVTVPSSSLGTQTYICNVNHKPSNTKVDKRV

SEQ ID NO: 269 - protein, 215 aa, Artificial Sequence
  Synthetic: 1F4 Light chain variable region and CL
EIVLTQSPGTLSLSPGERATLSCRASQSISSSYLAWYQQKPGQAPRLLIYGASSRATGIPDRFSGSGSGTDFTLTISRLEPEDFAVYYCQQYGSSPYTFGQGTKLEIKRTVAAPSVFIFPPSDEQLKSGTASVVCLLNNFYPREAKVQWKVDNALQSGNSQESVTEQDSKDSTYSLSSTLTLSKADYEKHKVYACEVTHQGLSSPVTKSFNRGEC

SEQ ID NO: 270 - protein, 450 aa, Artificial Sequence
  Synthetic: 1F4-IgG1f heavy chain
EVQLLESGGGLVQPGGSLRLSCAASGFTFSIYAMSWVRQAPGKGLEWVSAISDSGGRTYFADSVRGRFTISRDNSKNTLSLQMNSLRAEDTAVYYCAKVDYSNYLFFDYWGQGTLVTVSSASTKGPSVFPLAPSSKSTSGGTAALGCLVKDYFPEPVTVSWNSGALTSGVHTFPAVLQSSGLYSLSSVVTVPSSSLGTQTYICNVNHKPSNTKVDKRVEPKSCDKTHTCPPCPAPELLGGPSVFLFPPKPKDTLMISRTPEVTCVVVDVSHEDPEVKFNWYVDGVEVHNAKTKPREEQYNSTYRVVSVLTVLHQDWLNGKEYKCKVSNKALPAPIEKTISKAKGQPREPQVYTLPPSREEMTKNQVSLTCLVKGFYPSDIAVEWESNGQPENNYKTTPPVLDSDGSFFLYSKLTVDKSRWQQGNVFSCSVMHEALHNHYTQKSLSLSPGK

SEQ ID NO: 271 - protein, 446 aa, Artificial Sequence
  Synthetic: 1F4-IgG4.1 heavy chain
EVQLLESGGGLVQPGGSLRLSCAASGFTFSIYAMSWVRQAPGKGLEWVSAISDSGGRTYFADSVRGRFTISRDNSKNTLSLQMNSLRAEDTAVYYCAKVDYSNYLFFDYWGQGTLVTVSSASTKGPSVFPLAPCSRSTSESTAALGCLVKDYFPEPVTVSWNSGALTSGVHTFPAVLQSSGLYSLSSVVTVPSSSLGTKTYTCNVDHKPSNTKVDKRVESKYGPPCPPCPAPEFLGGPSVFLFPPKPKDTLMISRTPEVTCVVVDVSQEDPEVQFNWYVDGVEVHNAKTKPREEQFNSTYRVVSVLTVLHQDWLNGKEYKCKVSNKGLPSSIEKTISKAKGQPREPQVYTLPPSQEEMTKNQVSLTCLVKGFYPSDIAVEWESNGQPENNYKTTPPVLDSDGSFFLYSRLTVDKSRWQEGNVFSCSVMHEALHNHYTQKSLSLSLG

SEQ ID NO: 272 - protein, 449 aa, Artificial Sequence
  Synthetic: 1F4-IgG1.1f heavy chain
EVQLLESGGGLVQPGGSLRLSCAASGFTFSIYAMSWVRQAPGKGLEWVSAISDSGGRTYFADSVRGRFTISRDNSKNTLSLQMNSLRAEDTAVYYCAKVDYSNYLFFDYWGQGTLVTVSSASTKGPSVFPLAPSSKSTSGGTAALGCLVKDYFPEPVTVSWNSGALTSGVHTFPAVLQSSGLYSLSSVVTVPSSSLGTQTYICNVNHKPSNTKVDKRVEPKSCDKTHTCPPCPAPEAEGAPSVFLFPPKPKDTLMISRTPEVTCVVVDVSHEDPEVKFNWYVDGVEVHNAKTKPREEQYNSTYRVVSVLTVLHQDWLNGKEYKCKVSNKALPSSIEKTISKAKGQPREPQVYTLPPSREEMTKNQVSLTCLVKGFYPSDIAVEWESNGQPENNYKTTPPVLDSDGSFFLYSKLTVDKSRWQQGNVFSCSVMHEALHNHYTQKSLSLSPG

SEQ ID NO: 273 - protein, 449 aa, Artificial Sequence
  Synthetic: 1F4-IgG1.3f heavy chain
EVQLLESGGGLVQPGGSLRLSCAASGFTFSIYAMSWVRQAPGKGLEWVSAISDSGGRTYFADSVRGRFTISRDNSKNTLSLQMNSLRAEDTAVYYCAKVDYSNYLFFDYWGQGTLVTVSSASTKGPSVFPLAPSSKSTSGGTAALGCLVKDYFPEPVTVSWNSGALTSGVHTFPAVLQSSGLYSLSSVVTVPSSSLGTQTYICNVNHKPSNTKVDKRVEPKSCDKTHTCPPCPAPEAEGAPSVFLFPPKPKDTLMISRTPEVTCVVVDVSHEDPEVKFNWYVDGVEVHNAKTKPREEQYNSTYRVVSVLTVLHQDWLNGKEYKCKVSNKALPAPIEKTISKAKGQPREPQVYTLPPSREEMTKNQVSLTCLVKGFYPSDIAVEWESNGQPENNYKTTPPVLDSDGSFFLYSKLTVDKSRWQQGNVFSCSVMHEALHNHYTQKSLSLSPG

SEQ ID NO: 274 - protein, 448 aa, Artificial Sequence
  Synthetic: 1F4-D265A heavy chain
EVQLLESGGGLVQPGGSLRLSCAASGFTFSIYAMSWVRQAGKGLEWVSAISDSGGRTYFADSVRGRFTISRDNSKNTLSLQMNSLRAEDTAVYYCAKVDYSNYLFFDYWGQGTLVTVSSASTKGPSVFPLAPSSKSTSGGTAALGCLVKDYFPEPVTVSWNSGALTSGVHTFPAVLQSSGLYSLSSVVTVPSSSLGTQTYICNVNHKPSNTKVDKRVEPKSCDKTHTCPPCPAPELLGGPSVFLFPPKPKDTLMISRTPEVTCVVVAVSHEDPEVKFNWYVDGVEVHNAKTKPREEQYNSTYRVVSVLTVLHQDWLNGKEYKCKVSNKALPAPIEKTISKAKGQPREPQVYTLPPSREEMTKNQVSLTCLVKGFYPSDIVEWESNGQPENNYKTTPPVLDSDGSFFLYSKLTVDKSRWQQGNVFSCSVMHEALHNHYTQKSLSLSPGK

SEQ ID NO: 275 - protein, 450 aa, Artificial Sequence
  Synthetic: 1F4-CT heavy chain
EVQLLESGGGLVQPGGSLRLSCAASGFTFSIYAMSWVRQAPGKGLEWVSAISDSGGRTYFADSVRGRFTISRDNSKNTLSLQMNSLRAEDTAVYYCAKVDYSNYLFFDYWGQGTLVTVSSASTKGPSVFPLAPSSKSTSGGTAALGCLVKDYFPEPVTVSWNSGALTSGVHTFPAVLQSSGLYSLSSVVTVPSSSLGTQTYICNVNHKPSNTKVDKRVEPKSCDKTHTSPPSPAPELLGGSSVFLFPPKPKDTLMISRTPEVTCVVVDVSHEDPEVKFNWYVDGVEVHNAKTKPREEQYNSTYRVVSVLTVLHQDWLNGKEYKCKVSNKALPAPIEKTISKAKGQPREPQVYTLPPSRDELTKNQVSLTCLVKGFYPSDIAVEWESNGQPENNYKTTPPVLDSDGSFFLYSKLTVDKSRWQQGNVFSCSVMHEALHNHYTQKSLSLSPGK
